(19) United States
(12) Patent Application Publication
(10) Pub. No.: US 2023/0048847 A1
(43) Pub. Date: Feb. 16, 2023

(54) ENGINEERED LEISHMANIA CELLS

(71) Applicant: LIMMATECH BIOLOGICS AG, Schlieren (CH)

(72) Inventors: Manuela MALLY, Schlieren (CH); Amirreza FARIDMOAYER, Schlieren (CH); Fabio SERVENTI, Schlieren (CH); Rainer FOLLADOR, Schlieren (CH); Anke Judith HARSMAN, Schlieren (CH)

(73) Assignee: LIMMATECH BIOLOGICS AG, Schlieren (CH)

(21) Appl. No.: 17/791,085

(22) PCT Filed: Jan. 7, 2021
(86) PCT No.: PCT/EP2021/050173

§ 371 Date: Jul. 6, 2022

Related U.S. Application Data
(60) Provisional application No. 62/958,088, filed on Jan. 7, 2020.

(51) Int. Cl. C12N 15/90; C12N 15/79; C12P 21/00

(52) U.S. Cl. CPC C12N 15/902; C12N 15/79; C12P 21/005

(57) ABSTRACT

The present application relates to a method of recombinantly engineering a Leishmania cell that involves homologous recombination of DNA fragments. Further provided herein are Leishmania cells recombinantly engineered using the method provided herein. Also provided herein are methods of making a polypeptide using a Leishmania cell described herein and polypeptides produced by the methods provided herein.

[0001] This application claims priority to U.S. Provisional Application No. 62/958,088, filed on Jan. 7, 2020, the entirety of which is incorporated herein by reference.

### SEQUENCE LISTING

[0002] This application incorporates by reference in its entirety the Computer Readable Form (CRF) of a Sequence Listing in ASCII text format. The Sequence Listing text file is entitled “14197-011-228_SEQ_LISTING,” was created on Dec. 21, 2020, and is 1,115,773 bytes in size.

### 1. INTRODUCTION

[0003] The present application relates to a method of recombinantly engineering a Leishmania cell that involves homologous recombination of DNA fragments. Further provided herein are Leishmania cells recombinantly engineered using the method provided herein. Also provided herein are methods of making a polypeptide using a Leishmania cell described herein and polypeptides produced by the methods provided herein.

### 2. BACKGROUND

[0004] Leishmania sp. have unusual genetic properties, for example, a certain level of lacking transcriptional control. Genes are transcribed into polycistronic pre-mRNAs that are subsequently processed into mature mRNAs by trans splicing, which involves the addition of a spliced leader or miniexon, and polyadenylation. Control of gene expression does not occur at the transcriptional level but rather at the level of RNA stability, translation and protein turnover (Roberts, Sigrid C. (2011) Bioeng Bugs 2 (6), pp. 320-326). These processes are influenced by the non-coding DNA regions (intergenic regions, IRs) between the genes (Breitling, et al. (2002) Protein Expr. Purif. 25 (2), pp. 209-218). For this reason, all protein-coding sequences need to be separated by intergenic regions that may be originating from Leishmania tarentolae or closely related species. This is also the case when using recombinant DNA and vector plasmids.

[0005] Direct assembly of multiple linear DNA fragments via homologous recombination, also described as in vivo assembly or transformation associated recombination, has been successfully applied to assemble DNA constructs ranging in size from a few kilobases to full synthetic microbial genomes. It has also enabled the complete replacement of eukaryotic chromosomes with heterologous DNA. Complex in vivo assembly of multiple DNA fragments is a routine procedure using S. cerevisiae, contributing to its extensive use as a synthetic biology and biotechnology host (Shao, et al. (2009) Nucleic acids research 37 (2), e16).

[0006] Leishmania sp. effectively undergo homologous recombination, which is used for example to exchange target genes with drug resistance markers where the introduced drug resistance markers provide a selection mechanism. Targeting constructs are designed in which upstream and downstream regions corresponding to the flanking sequences of the target gene are joined to a drug resistance cassette. Previously, time-consuming cloning steps were involved in the generation of targeting DNAs (Roberts, Sigrid C. (2011) Bioeng Bugs 2 (6), pp. 320-326). Some techniques have been developed that simultaneously assemble multiple DNA fragments and considerably simplify the assembly of targeting constructs. Examples include the use of a PCR fusion-based strategy (Mukherjee, et al. (2009) Mol Microbiol 74 (4), pp. 914-927) and a one-step multi-fragment ligation technique (Fulwiler, et al. (2011) Molecular and Biochemical Parasitology 175 (2), pp. 209-212). The general strategy was described to be adaptable to the generation of targeting constructs for other parasites and genetically manipulatable organisms by simply producing species-specific selectable markers flanked by the appropriate SfiI sites (Fulwiler, et al. (2011) Molecular and Biochemical Parasitology 175 (2), pp. 209-212). This multi-fragment ligation technique was described for generating deletion strains, but not for knock-in/insertion strains.

[0007] To use Leishmania as an expression host for glycoengineered therapeutic proteins (International Publication No. WO2019/002512 A2, incorporated by reference in its entirety herein), several recombinant elements may be inserted into the host cell genome and co-expressed at the same time. Regulatory DNA sequences flanking the recombinantly expressed genes of interest are required for efficient expression, i.e. for processing and splicing of the mature processed mRNA from a polycistronic pre-mRNA. The number of genes and regulatory sequences to be inserted becomes limiting in the case of multiple gene insertions, because inserting identical sequences into the same genome can lead to undesired recombination events. Provided herein are methods to address these concerns.

### 3. SUMMARY OF THE INVENTION

[0008] Provided herein are methods of recombinantly engineering a Leishmania cell, Leishmania cells, kits comprising the Leishmania cells, methods of making a polypeptide using a Leishmania cell, and polypeptides produced by such methods.

[0009] In one aspect, provided herein is a method of recombinantly engineering a Leishmania cell comprising

(a) introducing two or more DNA fragments into the Leishmania cell, and
(b) incubating the Leishmania cell to allow homologous recombination of the DNA fragments,
wherein a first DNA fragment of the two or more DNA fragments comprises a 5′ homologous region and/or a 3′ homologous region; wherein the 5′ homologous region is homologous to a 3′ homologous region of a second DNA fragment of the two or more DNA fragments or the 3′ homologous region of the first DNA fragment is homologous to a 5′ homologous region of the second DNA fragment; and
wherein the nucleotide sequences of the first and the second DNA fragments outside the homologous region(s) are not homologous to each other; are not homologous to a sequence in the Leishmania cell's genome; and/or have no homologies within the respective DNA fragment.

[0010] In certain embodiments, each of the two or more DNA fragments comprises a 5′ homologous region and/or a 3′ homologous region; wherein the 5′ homologous region of the each of the two or more DNA fragments is homologous to a 3′ homologous region of another one of the two or more DNA fragments or the 3′ homologous region of the each of the two or more DNA fragments is homologous to a 5′ homologous region of another one of the two or more DNA fragments; and wherein the nucleotide sequences outside the homologous regions in each DNA fragment are not homologous to each other; are not homologous to a sequence in the Leishmania cell's genome; and/or have no homologies within the respective DNA fragment.

[0011] In certain embodiments, the two or more DNA fragments, optionally after the two or more DNA fragments are recombined with each other, are suitable for integration into a chromosome of the Leishmania cell. In certain embodiments, the two or more DNA fragments, optionally after the two or more DNA fragments are recombined with each other, are integrated into the chromosome of the Leishmania cell. In certain embodiments, the two or more DNA fragments are integrated in tandem into the paraflagellar rod protein (Pfr) locus. In certain embodiments, the two or more DNA fragments are integrated at the start of the 18S coding region (Ssu-PolI).

[0012] In certain embodiments, the two or more DNA fragments, before and/or after recombination with each other, are not integrated in a chromosome of the Leishmania cell.

[0013] In certain embodiments, the homologous recombination of the two or more DNA fragments results in a circular plasmid.

[0014] In certain embodiments, the nucleotide sequence of the first DNA fragment outside the homologous region is at least 10 nucleotides, 20 nucleotides, 30 nucleotides, 40 nucleotides, 50 nucleotides, 100 nucleotides, 200 nucleotides, 300 nucleotides, 400 nucleotides, 500 nucleotides, 600 nucleotides, 700 nucleotides, 800 nucleotides, 900 nucleotides, 1000 nucleotides, 2000 nucleotides, 5000 nucleotides, 10000 nucleotides, 15000 nucleotides, or 20000 nucleotides, 25000 nucleotides, 30000 nucleotides, 35000 nucleotides, 40000 nucleotides, 45000 nucleotides, or at least 50000 nucleotides in length. In certain embodiments, the nucleotide sequence of the second DNA fragment outside the homologous region is at least 10 nucleotides, 20 nucleotides, 30 nucleotides, 40 nucleotides, 50 nucleotides, 100 nucleotides, 200 nucleotides, 300 nucleotides, 400 nucleotides, 500 nucleotides, 600 nucleotides, 700 nucleotides, 800 nucleotides, 900 nucleotides, 1000 nucleotides, 2000 nucleotides, 5000 nucleotides, 10000 nucleotides, 15000 nucleotides, or 20000 nucleotides, 25000 nucleotides, 30000 nucleotides, 35000 nucleotides, 40000 nucleotides, 45000 nucleotides, or at least 50000 nucleotides in length. In certain embodiments, the nucleotide sequences of all of the two or more DNA fragments outside the homologous region are at least 10 nucleotides, 20 nucleotides, 30 nucleotides, 40 nucleotides, 50 nucleotides, 100 nucleotides, 200 nucleotides, 300 nucleotides, 400 nucleotides, 500 nucleotides, 600 nucleotides, 700 nucleotides, 800 nucleotides, 900 nucleotides, 1000 nucleotides, 2000 nucleotides, 5000 nucleotides, 10000 nucleotides, 15000 nucleotides, or 20000 nucleotides, 25000 nucleotides, 30000 nucleotides, 35000 nucleotides, 40000 nucleotides, 45000 nucleotides, or at least 50000 nucleotides in length.

[0015] In certain embodiments, the homologous recombination of the DNA fragments results in a nucleotide sequence that is 50 nucleotides to 100 nucleotides, 100 nucleotides to 500 nucleotides, 500 nucleotides to 1000 nucleotides, 1000 nucleotides to 5000 nucleotides, 5000 nucleotides to 10000 nucleotides, 10000 nucleotides to 15000 nucleotides, 15000 nucleotides to 20000 nucleotides, 20000 nucleotides to 25000 nucleotides, 25000 nucleotides to 30000 nucleotides, 30000 nucleotides to 35000 nucleotides, 35000 nucleotides to 40000 nucleotides, 40000 nucleotides to 45000 nucleotides, 45000 nucleotides to 50000 nucleotides, 50000 nucleotides to 55000 nucleotides, 55000 nucleotides to 60000 nucleotides, 60000 nucleotides to 65000 nucleotides, 65000 nucleotides to 70000 nucleotides, 70000 nucleotides to 75000 nucleotides, or 75000 nucleotides to 80000 nucleotides in length.

[0016] In certain embodiments, the 5′ homologous region and/or the 3′ homologous region of the first DNA fragment is at least 10 nucleotides, 20 nucleotides, 30 nucleotides, 40 nucleotides, 50 nucleotides, 100 nucleotides, 150 nucleotides, 200 nucleotides, 250 nucleotides, 300 nucleotides, 350 nucleotides, 400 nucleotides, 450 nucleotides, or at least 500 nucleotides in length. In certain embodiments, the 5′ homologous region and/or the 3′ homologous region of the second DNA fragment is at least 10 nucleotides, 20 nucleotides, 30 nucleotides, 40 nucleotides, 50 nucleotides, 100 nucleotides, 150 nucleotides, 200 nucleotides, 250 nucleotides, 300 nucleotides, 350 nucleotides, 400 nucleotides, 450 nucleotides, or at least 500 nucleotides in length. In certain embodiments, the 5′ homologous region and/or the 3′ homologous region of all of the two or more DNA fragments is at least 10 nucleotides, 20 nucleotides, 30 nucleotides, 40 nucleotides, 50 nucleotides, 100 nucleotides, 150 nucleotides, 200 nucleotides, 250 nucleotides, 300 nucleotides, 350 nucleotides, 400 nucleotides, 450 nucleotides, or at least 500 nucleotides in length.

[0017] In certain embodiments, the 5′ homologous region and/or the 3′ homologous region of the first DNA fragment is at most 500 nucleotides, 550 nucleotides, 600 nucleotides, 650 nucleotides, 700 nucleotides, 750 nucleotides, 800 nucleotides, 850 nucleotides, 900 nucleotides, 950 nucleotides, 1000 nucleotides, 1200 nucleotides, 1400 nucleotides, 1600 nucleotides, 1800 nucleotides, 2000 nucleotides, 2200 nucleotides, 2400 nucleotides, 2600 nucleotides, 2800 nucleotides, 3000 nucleotides, 3200 nucleotides, 3400 nucleotides, 3600 nucleotides, 3800 nucleotides, 4000 nucleotides, 4200 nucleotides, 4400 nucleotides, 4600 nucleotides, 4800 nucleotides, or at most 5000 nucleotides in length. In certain embodiments, the 5′ homologous region and/or the 3′ homologous region of the second DNA fragment is at most 500 nucleotides, 550 nucleotides, 600 nucleotides, 650 nucleotides, 700 nucleotides, 750 nucleotides, 800 nucleotides, 850 nucleotides, 900 nucleotides, 950 nucleotides, 1000 nucleotides, 1200 nucleotides, 1400 nucleotides, 1600 nucleotides, 1800 nucleotides, 2000 nucleotides, 2200 nucleotides, 2400 nucleotides, 2600 nucleotides, 2800 nucleotides, 3000 nucleotides, 3200 nucleotides, 3400 nucleotides, 3600 nucleotides, 3800 nucleotides, 4000 nucleotides, 4200 nucleotides, 4400 nucleotides, 4600 nucleotides, 4800 nucleotides, or at most 5000 nucleotides in length. In certain embodiments, the 5′ homologous region and/or the 3′ homologous region of all of the two or more DNA fragments is at most 500 nucleotides, 550 nucleotides, 600 nucleotides, 650 nucleotides, 700 nucleotides, 750 nucleotides, 800 nucleotides, 850 nucleotides, 900 nucleotides, 950 nucleotides, 1000 nucleotides, 1200 nucleotides, 1400 nucleotides, 1600 nucleotides, 1800 nucleotides, 2000 nucleotides, 2200 nucleotides, 2400 nucleotides, 2600 nucleotides, 2800 nucleotides, 3000 nucleotides, 3200 nucleotides, 3400 nucleotides, 3600 nucleotides, 3800 nucleotides, 4000 nucleotides, 4200 nucleotides, 4400 nucleotides, 4600 nucleotides, 4800 nucleotides, or at most 5000 nucleotides in length.

[0018] In certain embodiments, the 5′ homologous region of the first DNA fragment and the 3′ homologous region of the second DNA fragment have at least 20%, 25%, 30%, 35%, 40%, 45%, 50%, 55%, 60%, 65%, 70%, 75%, 80%, 85%, 90%, 95%, or 100% sequence identity. In certain embodiments, the 3′ homologous region of the first DNA fragment and the 5′ homologous region of the second DNA fragment have at least 20%, 25%, 30%, 35%, 40%, 45%, 50%, 55%, 60%, 65%, 70%, 75%, 80%, 85%, 90%, 95%, or 100% sequence identity.

[0019] In certain embodiments, the two or more DNA fragments are introduced by transfection. In certain embodiments, the two or more DNA fragments are introduced concurrently.

[0020] In certain embodiments, the number of DNA fragments is 2, 3, 4, 5, 6, 7, 8, 9, 10, 11, 12, 13, 14, 15, 16, 17, 18, 19, 20, 21, 22, 23, 24, 25, 26, 27, 28, 29, 30, 31, 32, 33, 34, 35, 36, 37, 37, 39, 40, 41, 42, 43, 44, 45, 46, 47, 48, 49, or 50.

[0021] In certain embodiments, the nucleotide sequences of the two or more DNA fragments outside the homologous region are selected from a group consisting of intergenic regions (IRs), untranslated regions (UTRs), and open reading frames (ORFs) encoding polypeptides. In certain embodiments, the IRs, UTRs and ORFs are devoid of homologous sequences within itself, and/or homologous sequences to one another.

[0022] In certain embodiments, the nucleotide sequences of the two or more DNA fragments outside the homologous region encode the same polypeptide. In certain embodiments, the Leishmania cell is capable of expressing two or more copies of the same polypeptide. In certain embodiments, the method increases the expression level of the polypeptide.

[0023] In certain embodiments, the homologous recombination of the DNA fragments results in a nucleotide sequence comprising at least 50%, 60%, 70%, 80%, 90% or 100% of genetic information encoded by the two or more DNA fragments.

[0024] In certain embodiments, the undesired crossing out and/or crossing over occurs in at most 0.01%, 0.05%, 0.1%, 0.5%, 1%, 2%, 3%, 4%, 5%, 6%, 7%, 8%, 9% or at most 10% of the Leishmania cells over a period of at least 1 day, 2 days, 3 days, 4 days, 5 days, 6 days, 7 days, 8 days, 9 days, or at least 10 days. In certain embodiments, the undesired crossing out and/or crossing over occurs in at most 0.01%, 0.05%, 0.1%, 0.5%, 1%, 2%, 3%, 4%, 5%, 6%, 7%, 8%, 9% or at most 10% of the Leishmania cells over at least 1, 2, 3, 4, 5, 6, 7, 8, 9, or at least 10 cell divisions.

[0025] In certain embodiments, the Leishmania cell is Leishmania tarentolae.

[0026] In another aspect, provided herein is a Leishmania cell recombinantly engineered using the methods provided herein. In certain embodiments, the Leishmania cell is recombinantly engineered using the method repeatedly. In certain embodiments, the Leishmania cell is Leishmania tarentolae.

[0027] In another aspect, provided herein is a kit comprising one or more containers and instructions for use, wherein said one or more containers comprise the Leishmania cell provided herein.

[0028] In another aspect, provided herein is a method of making a polypeptide comprising (a) culturing the Leishmania cell provided herein under suitable conditions for polypeptide production; and (b) isolating the polypeptide. In certain embodiments, the method further comprises introducing a nucleotide sequence encoding the polypeptide.

[0029] In yet another aspect, provided herein is a polypeptide produced by the method of making a polypeptide provided herein.

### 3.1 Definitions

[0030] As used herein and unless otherwise indicated, the term “extremity” refers to a region at the 5′ or 3′ end of a DNA fragment.

[0031] As used herein and unless otherwise indicated, the term “about,” when used in conjunction with a number, refers to any number within ±1, ±5 or ±10% of the referenced number.

[0032] As used herein and unless otherwise indicated, the term “subject” refers to an animal (e.g., birds, reptiles, and mammals). In another embodiment, a subject is a mammal including a non-primate (e.g., a camel, donkey, zebra, cow, pig, horse, goat, sheep, cat, dog, rat, and mouse) and a primate (e.g., a monkey, chimpanzee, and a human). In certain embodiments, a subject is a non-human animal. In some embodiments, a subject is a farm animal or pet (e.g., a dog, cat, horse, goat, sheep, pig, donkey, or chicken). In a specific embodiment, a subject is a human. The terms “subject” and “patient” may be used herein interchangeably.

[0033] As used herein and unless otherwise indicated, the term “effective amount,” in the context of administering a therapy (e.g., a composition described herein) to a subject refers to the amount of a therapy which has a prophylactic and/or therapeutic effect(s). In certain embodiments, an “effective amount” refers to the amount of a therapy which is sufficient to achieve one, two, three, four, or more of the following effects: (i) reduce or ameliorate the severity of a disease/disorder or symptom associated therewith; (ii) reduce the duration of a disease/disorder or symptom associated therewith; (iii) prevent the progression of a disease/disorder or symptom associated therewith; (iv) cause regression of a disease/disorder or symptom associated therewith; (v) prevent the development or onset of a disease/disorder, or symptom associated therewith; (vi) prevent the recurrence of a disease/disorder or symptom associated therewith; (vii) reduce organ failure associated with a disease/disorder; (viii) reduce hospitalization of a subject having a disease/disorder; (ix) reduce hospitalization length of a subject having a disease/disorder; (x) increase the survival of a subject with a disease/disorder; (xi) eliminate a disease/disorder in a subject; and/or (xii) enhance or improve the prophylactic or therapeutic effect(s) of another therapy.

### 3.2 Conventions and Abbreviations

| Abbreviation | Convention |
|---|---|
| bp | base pair |
| CDS | coding sequence |
| EPO | erythropoietin |
| GlcNAc-transferase | N-acetylglucosamine-transferase |
| IR | Intergenic region |
| mAb | monoclonal antibody |
| ORF | open reading frames |
| UTR | untranslated region |
| Man3 | [chemical structure] |
| G0-N | [chemical structure] |
| G0 | [chemical structure] |
| G1-N | [chemical structure] |
| G1 | [chemical structure] |
| | or |
| | [chemical structure] |
| G1S1-N | [chemical structure] |
| G2 | [chemical structure] |
| G1S1 | [chemical structure] |
| | or |
| | [chemical structure] |
| G2S1 | [chemical structure] |
| G2S2 | [chemical structure] |

### 4. BRIEF DESCRIPTION OF THE FIGURES

[0035] FIGS. 1A-1B: Leishmania tarentolae is able to assemble a chromosomal integration construct from multiple DNA fragments by homologous recombination. (FIG. 1A) Schematic representation of a full length monoclonal antibody (mAb) expression construct. The integration construct for Rituximab (top) comprises the homologous recombination sites for integration into the ssu locus (Lhr [ssu] and Rhr [ssu]), 4 intergenic regions ensuring correct transcription and splicing of the mRNA (IR1=aprtlR; IR2=aTubIR from L. enrietti; IR3=CamIR from L. tarentolae; IR4=dhfr-ts) and the open reading frames (ORF) for the light (ORF1) and heavy (ORF2) chains of Rituximab and the selection marker NTC (ORFS). The full construct is present on plasmid pLMTB5026, or split between fragments present on donor plasmids pLMTB5024 and pLMTB5025. Overlapping regions for homologous recombination into the genome (>500 bp; lower part of figure) and between the fragments (250 bp) are indicated as grey bars. (FIG. 1B) Western blot analysis of cell culture supernatants of strains generated by co-transfecting two DNA fragments that should recombine in vivo in order to form an expression construct for a monoclonal antibody (Rituximab). Positive control=Rituximab (Anti CD20, Lubio: A1049-100). Expression of full-length monoclonal antibody can be detected via light chain or heavy chain specific antibodies directly in the cell culture supernatant.

[0036] FIG. 2: Multiple homologous recombination events of heterologous coding sequences lead to function-engineered Leishmania host cells. Schematic representation of the integration constructs (top) comprising the homologous recombination sites for integration into the AQP locus (Lhr [AQP] and Rhr [AQP]), regulatory elements (PolA; promoter) and intergenic regions ensuring correct transcription and splicing of the mRNA (aTubIR from L. enrietti; Pfr IR=IR of paraflagellar rod protein from L. tarentolae; Val IR, IR from Valosin from L. tarentolae; Cam IR from L. tarentolae and UtrA=dhfr-ts) and the coding sequences for heterologous glycosyltransferases (sfGntI, rnMGAT2, drMGAT1, hsB4GalT1, see, e.g., International Publication No. WO2019/002512 A2, incorporated by reference in its entirety herein) and the selection marker hygromycin Sm[hyg]). The full construct is split between ten fragments, which were excised from ten donor plasmids. Overlapping regions for homologous recombination into the genome (500 bp) are within black boxes at the extremities and homologous recombination regions between the fragments (200 bp) are indicated as grey bars. Bottom graph shows the functional read out of glycoengineering efficiencies, indicated as relative % N-glycans, which were released from cellular proteins and measured by routine N-glycan analysis such as RF-MS or PC-labeling.

[0037] FIGS. 3A-3C: Multiple homologous events of heterologous coding sequences interspaced by Leishmania tarentolae regulatory elements and intergenic regions (IRs). (FIG. 3A) Functional read out of glycoengineering efficiencies is indicated as relative % N-glycans, released from cellular proteins and measured by routine RF-MS, and shows activity of all enzymatic steps in St15368. Absent activities from second glycoengineering enzymatic step by MGAT2 in St15448 suggest phenotypic differences based on desired and undesired integration events. (FIG. 3B) Schematic representation of the integration (top) comprising the homologous recombination sites for counterclockwise disruption of aquaporin (AQP) (dark grey boxes, Lhr and Rhr), regulatory elements PolA, and intergenic regions (striped boxes) ensuring correct transcription and splicing of the mRNA (aTubIR from L. enrietti; Pfr IR=IR of paraflagellar rod protein from L. tarentolae; Val IR, IR from Valosin from L. tarentolae; 60S ribosomal protein L23 from L. tarentolae and a 3′ UTR downstream of the selection marker gene (SmA). The coding sequences for heterologous glycosyltransferases are rnMGAT2 (GtD), hsB4GalT1 (GtE), sfGntI (GtA), drMGAT1 (GtB), and SmA for the selection marker hygromycin. Inserted genetic element regions are shaded with grey dotted background. Correct integration is exemplified for St15368 (top). Region marked with black background and white dots shows the Pfr IR that caused an undesired crossing over to the identical Pfr IR sequence in Chromosome 29, thereby omitting the recombinant genetic elements of rnMGAT2 (GtD), hsB4GalT1 (GtE) in St15448 (bottom) and (FIG. 3C) leading to a hybrid chromosome as identified by PacBio sequencing (PacBio raw subread m54073_181001_130829/9307006/0_32110).

[0038] FIG. 4: Schematic representation of the intended integration comprising the 500 bp homologous recombination sites (dark grey boxes) for counterclockwise disruption of Ptr1 in Chromosome 23 (Lhr and Rhr), regulatory element PolI (“PolA”), and intergenic regions (IRs, striped boxes) ensuring correct transcription and splicing of the mRNA and a 3′ UTR downstream of the selection marker gene (SmA). The coding sequences for heterologous glycosyltransferases are hsB4GalT1 (ORF1), hsMGAT1 (ORF2) rnMGAT2 (ORF3), and SM for the selection marker hygromycin. The full expression cassette is split between eight fragments, which were excised from their donor plasmids. Overlapping regions for homologous recombination into the genome (500 bp at the extremities) and between the fragments (200 bp) are indicated as grey boxes. Within black brackets, the region shaded dark grey with white dots marks an identical stretch of 93 bp derived from the 3×HA tag at the C-terminus of hsMGAT1 ORF in donor fragment GtC_5IrLmM(8081), and the identical sequence in IrLmO_5GtD (8085) derived from the 3×HA tag also present at the C-terminus of rnMGAT2 ORF. Homologous recombination of these fragments creates an undesired crossing out and omission of genetic information for IR2 and rnMGAT2. The phenotype is represented by glycoengineering activities of the GTs, and the absence of G0 and G2 glycans suggests absence of MGAT2 activity, shown as graph with relative % N-glycans (Top left).

[0039] FIG. 5: Schematic representation of different chromosomal integration strategies with light grey arrows indicating chromosomal coding sequences and dark grey arrows heterologous coding sequences that are inserted via homology ends at their extremities (shaded grey). The regulatory element PolI is a promoter region for PolI transcription and used for transcription initiation in counter clockwise integration constructs.

[0040] FIGS. 6A-6B: Heterologous and non-identical sequences ensure correct chromosomal integrations and internal fragment recombinations, while selected heterologous regulatory sequences are functional in Leishmania tarentolae CustomGlycan host cells. (FIG. 6A) Glycoengineering activities of the GTs are assessed as relative % N-glycans derived from total surface glycoproteins and compared between the different strains differing in their IRs but not in the GT and SM coding sequences. (FIG. 6B) Schematic representation of the Nanopore sequencing analysis results for the different integrations and resulting strains (St17212=LmIR, St17311=LdIR, St17176=LiIR, St17180=LmxIR). Each integration comprises the homologous recombination sites for integration into the GP63 locus of Chromosome 10 (LhrD [GP63] and RhrD [GP63]). The intergenic regions (Ir) derived from different Leishmania species L. major (Lm), L. donovani (Ld), L. infantum (Li), L. mexicana (Lmx) and ensuring correct transcription and splicing of the mRNA, are shown as striped boxes with indicated text description for each IR. The coding sequences for heterologous glycosyltransferases, GTs, (sfGntI, rnMGAT2, drMGAT1, hsB4GalT1) are depicted as white arrows and the selection marker hygromycin in grey and are identical in all four strains.

[0041] FIG. 7: Stepwise increase of N-glycan conversion efficiency by transfection of several genetic modules, shown as N-glycans (relative in %) from surface glycoproteins of three consecutively generated strains, St17238 (1^{st}), St17294 (2^{nd}) and St17826 (3^{rd}). Increase in copy numbers of glycosyltransferases was achieved by using codon diversified enzymes and homologs from different species (hs, Homo sapiens; rn, Rattus norvegicus, dr, Danio rerio, gj, Gekko japonicus, ag, Anopheles gambiae).

[0042] FIGS. 8A-8C: Generation of an N-glycan sialylation proficient cell line St17527 by multiple homologous recombination of 13 fragments into the parental glycosyltransferase containing cell line (St17311). (FIG. 8A) Schematic representation of the genomic modification of St17527. Top indicates genomically integrated expression cassette in gp63 locus (Chromosome 10) from parental cell line St17311. The new integration comprises the homologous recombination sites for the alpha tubulin locus of Chromosome 13 (Lhr [aTub] and Rhr [aTub]), the intergenic regions (Ir) derived from L. infantum (IrLi) and L. major (IrLm) for transcription and splicing of the mRNA, shown as striped boxes. The coding sequences for sialic acid (Neu5Ac) biosynthesis, Golgi import and transfer to N-glycans (such as NeuC_{3×Myc}: UDP-N-acetyl glucosamine 2-epimerase, CgNal: N-acetylneuraminic acid lyase favoring N-acetylneuraminic acid synthesis, NeuB_{3xHA}: CMP-sialic acid synthase, _{3xHA}ST6: Beta-galactoside alpha-2,6-sialyltransferase 1, NeuA_{3xHA}: CMP-sialic acid synthetase and CST_{3×myc} CMP-Neu5Ac transporter) are depicted as white arrows and the selection marker, pac, in grey. (FIG. 8B) HPLC traces of DMB labelled total sialic acid (Neu5Ac+CMP-Neu5Ac) and CMP-Neu5Ac extracted from cell pellets of St17527 show presence of Neu5Ac and the activated sugar CMP-Neu5Ac and thus demonstrate functionality of sialic acid precursor biosynthesis. (FIG. 8C) Glycoengineering activities of the GTs is represented as relative % N-glycans derived from total surface glycoproteins. Total galactosylation and total sialylation is also indicated, demonstrating a function-customized L. tarentolae host cell.

[0043] FIGS. 9A-9C: Chromosomal integrations of the same glycoengineering construct into different chromosomal loci for high level glycoengineering activity of the expressed glycosyltransferases. (FIG. 9A) Schematic representation of chromosomal integration strategies targeting the Pfr locus on chromosome 29 as well as the rDNA expression locus on chromosome 27. Light grey arrows indicate chromosomal coding sequences and dark grey arrows indicate heterologous coding sequences that are inserted via homology ends at their extremities (shaded grey). Since the depicted chromosomal regions represent multi-copy loci, integration can occur in several different places, as indicated by the differently shaded grey bars. Regulatory elements ensuring correct processing of the pre-mRNA are shown as differently striped boxes flanking the 5′ end of the first integrated heterologous coding sequence in the case of integrations into the rDNA locus (Ssu and Ssu-PolI) and the 3′ end of the last heterologous coding sequence of the integration constructs. (FIG. 9B) Comparison of glycoengineering activities of the GTs encoded by the same G0 integration construct targeted to different chromosomal integration loci (“Pfr”, “Ssu” or “Ssu-PolI”). Shown are relative % N-glycans derived from total surface glycoproteins of the respective strains. (FIG. 9C) Comparison of glycoengineering activities of the GTs encoded by the same G0 integration construct targeted to different variants of the rDNA chromosomal integration locus (“Ssu” vs. “Ssu-PolI”). Shown are relative % N-glycans released from the Fc N-glycosylation site of a coexpressed monoclonal antibody (Adalimumab).

[0044] FIGS. 10A-10C: Multiple homologous recombination events of heterologous coding sequences lead to function-engineered Leishmania host cells. (FIG. 10A) Schematic representation of the integration construct (top) comprising the homologous recombination sites for integration into the “Pfr” locus (LhrP and RhrP), intergenic regions ensuring correct transcription and splicing of the mRNA (15 different IRs from L. major (Lm), L. donovani (Ld), L. infantum (Li), L. tarentolae (Lt) and UtrA=dhfr-ts are shown as striped boxes) and the coding sequences for heterologous glycosyltransferases (different orthologs of MGAT1, MGAT2, hsB4GalT1 are shown as white boxes, see, e.g., International Publication No. WO2019/002512 A2, incorporated by reference in its entirety herein), the coding sequences for enzymes of the sialic acid biogenesis and transfer pathway (shown as dark grey boxes) and the selection marker for Puromycin resistance (SmD, shown as light grey box). The full construct is split between 25 fragments, which were excised from 25 donor plasmids. Overlapping regions for homologous recombination into the genome (500 bp) are within black boxes at the extremities and homologous recombination regions between the fragments (200 bp or longer) are indicated as grey bars. Bottom graph shows the functional read out of glycoengineering efficiencies, indicated as relative % N-glycans, which were released from cellular proteins and measured by routine N-glycan analysis (PC-labeling). (FIG. 10B) Increase of N-glycan conversion efficiency by transfection of several genetic modules, shown as N-glycans (relative in %) from total surface glycoproteins of three consecutively generated strains, St18700 (1^{st}), St19084 (2^{nd}) and St19384 (3^{rd}). Increase in copy numbers of glycosyltransferases was achieved by using codon diversified enzymes and homologs from different species. (FIG. 10C) Alternative strains of different genetic composition that allow almost homogeneous N-glycan conversion to G2S2. Figure shows N-glycans (relative in %) from total surface glycoproteins of three alternative strains, St20157, St20208 and St20224.

[0045] FIGS. 11A-11D: Assembly of a hybrid prokaryotic gene cluster on an Escherichia coli cosmid in Leishmania tarentolae (FIG. 11A) Schematic representation of the designed fragments and the expected recombination via 200 bp homologous regions shaded in grey or grey striped. (FIG. 11B) Western blot analysis on E. coli DH5a transformed with plasmids isolated from several polyclones for expression of S. pneumoniae serotype 1 polysaccharide. Lane 1: PageRuler™ Prestained Protein Ladder, 10 to 180 kDa (ThermoFischer scientific), lane 2: polyclone 1.2, lane 3: polyclone 1.3, lane 4: polyclone 1.4, lane 5: polyclone 1.5, lane 6: polyclone 1.6, lane 7: polyclone 1.7, lane 8: polyclone 1.8, lane 9: polyclone 2.3. (FIG. 11C) Control restriction of plasmids isolated from different polyclones. A: restrictions on polyclones from transfections #1 and #2. Upper panel: BstBI restriction (expected sizes for correct construct: 22210 bp, 9042 bp, 3787 bp; for empty vector: 20801 bp), lower panel: BsiWI restriction (expected sizes for correct construct: 32536 bp, 2503 bp; for empty vector: undigested 20801 bp). Lane 1: GeneRuler™ 1 kb DNA ladder (Thermo-Fischer scientific), lane 2: polyclone 1.1, lane 3: polyclone 1.7, lane 4: polyclone 2.1, lane 5: polyclone 2.2, lane 6: pGVXN775. (FIG. 11D) Restriction on polyclones from transfection #3. Sad restriction (expected sizes for correct construct: 19628 bp, 3723 bp; for empty vector: 20801 bp). Lane 1: polyclone 3.1, lane 2: polyclone 3.2, lane 3: pLMTB6412, lane 4: GeneRuler™ 1 kb DNA ladder (Thermo-Fischer scientific).

### 5. DETAILED DESCRIPTION OF THE INVENTION

[0046] Provided herein are methods of recombinantly engineering a Leishmania cell, Leishmania cells engineered using the methods provided herein, methods of making a target polypeptide using a Leishmania cell provided herein, and target polypeptides produced by the methods. The methods of recombinantly engineering a Leishmania cell are described in Section 5.1. Properties of the resulting Leishmania cell are described in Section 5.2. Uses of such Leishmania cell as expression systems for target polypeptides, e.g., therapeutic proteins, are described in Section 5.3. Properties of the target polypeptides expressed in Leishmania host cells provided herein are described in Section 5.4.

[0047] Provided herein are i) a quick, multi-fragment homologous recombination to create large artificial chromosomal insertions of at least around 20 kb in Leishmania tarentolae hosts cells, ii) specific strategies to avoid undesired crossing out of recombinantly inserted genetic elements and iii) using multiple homologous recombination to assemble circular DNA adaptable for any heterologous shuttle vector use. Further, also provided herein is a method of increasing expression of a polypeptide by insertion of multiple expressed gene copies into the same host cell.

[0048] Problems using a multiple homologous recombination event for host cell engineering occur if the inserted DNA sequences are homologous/identical. Even short stretches of less than 100 bp can lead to undesired crossing over due to the very efficient natural recombination of Leishmania tarentolae.

[0049] Without being bound by theory, the methods provided herein reduce or eliminate such undesired crossing over. Specifically, described herein are i) multiple regulatory DNA sequences that enable functional processing and splicing of polycistronic pre-mRNA to form mature processed mRNA for protein expression, while differing sufficiently from each other and from any chromosomal sequence to avoid undesired crossing over (such sequences were taken from related species but not from Leishmania tarentolae), and ii) strategies to diversify coding sequences for genes that are intended to be inserted in multiple copies in such a way that they are not recombining with themselves but still are efficiently expressed.

[0050] The multi-fragment ligation strategy described herein for creating engineered host cells is markedly faster than traditional approaches, it moreover allows simultaneous integration of multiple ORFs with only one selection marker and thus expands the previously limited capacity of genetic engineering possibilities. Furthermore, the selection of different insertion elements (intergenic regulatory sequences or codon-diversified genes of interest) enables expression of glycoengineered therapeutics and yield increases by increasing gene copy numbers. This application describes fully function-customized host cells, which were created by the genetic methods described.

[0051] Moreover, due to L. tarentolae very efficient innate homologous recombination system, L. tarentolae can be used to assemble multiple heterologous DNA fragments to a circular DNA, if homologous sites to the L. tarentolae chromosome are absent. L. tarentolae is able to propagate episomal (Plasmid) DNA in absence of origin of replication. These methods consist of co-transfecting the donor plasmid and a series of DNA fragments which share homologies in their extremities and between their extremities and the recipient vector. A selection marker for L. tarentolae is added, which is as well separated into 2 fragments for selecting positive transfectants of L. tarentolae host cells. Nucleic acid from L. tarentolae PCR-positive cells can be extracted and the extracted material is transformed/transfected into target propagating microorganism on desired selection marker present in recipient vector. The technology can use any unmodified recipient circular DNA and no restriction site availability is necessary.

[0052] To summarize, multiple homologous recombination events, which efficiently occur in Leishmania, are exploited to introduce 2 to 20, and potentially even far more than 20, DNA fragments, which share homologies in their extremities, in order to create host cells that have site specifically integrated the genetic information containing coding sequences flanked by regulatory elements. Regulatory elements were identified from related species and remain functional when introduced in Leishmania tarentolae. Final genetic information comprises stretches of 20 kb/site specifically inserted into the chromosome of Leishmania host cells, and even larger insertions are possible. The application describes a novel tool using “plug and play” modules to efficiently create function-engineered Leishmania host cells. Additionally this efficient site-specific homologous recombination event is exploited to assemble multiple DNA fragments into an episomal construct, which can be adapted as shuttle vector for different unrelated host organisms, thereby representing an efficient cloning tool for complex shuttle vectors.

### 5.1 Methods of Recombinantly Engineering a Leishmania Cell

[0053] In one aspect, provided herein is a method of recombinantly engineering a Leishmania cell comprising (a) introducing two or more DNA fragments into the Leishmania cell, and (b) incubating the Leishmania cell to allow homologous recombination of the DNA fragments, wherein a first DNA fragment of the two or more DNA fragments comprises a 5′ homologous region and/or a 3′ homologous region; wherein the 5′ homologous region is homologous to a 3′ homologous region of a second DNA fragment of the two or more DNA fragments or the 3′ homologous region of the first DNA fragment is homologous to a 5′ homologous region of the second DNA fragment; and wherein the nucleotide sequences of the first and the second DNA fragments outside the homologous region(s) are not homologous to each other; are not homologous to a sequence in the Leishmania cell's genome; and/or have no homologies within the respective DNA fragment.

### 5.1.1 DNA Fragments

[0054] In certain embodiments, the DNA fragment described herein comprises a 5′ homologous region or a 3′ homologous region that is homologous to a 5′ homologous region or a 3′ homologous region of another DNA fragment. In certain embodiments, the DNA fragment described herein comprises a 5′ homologous region that is homologous to a 3′ homologous region of another DNA fragment. In certain embodiments, the DNA fragment described herein comprises a 3′ homologous region that is homologous to a 5′ homologous region of another DNA fragment. In certain embodiments, the DNA fragment described herein comprises a 5′ homologous region that is homologous to a 3′ homologous region of another DNA fragment, and a 3′ homologous region that is homologous to a 5′ homologous region of a third DNA fragment. In certain embodiments, the nucleotide sequences outside the homologous regions in the DNA fragment described herein are not homologous to each other. In certain embodiments, the nucleotide sequences outside the homologous regions in the DNA fragment described herein are not homologous to a sequence in the Leishmania cell's genome. In certain embodiments, the nucleotide sequences outside the homologous regions in the DNA fragment described herein have no homologies within the respective DNA fragment.

[0055] In certain embodiments, the first DNA fragment of the two or more DNA fragments comprises a 5′ homologous region and/or a 3′ homologous region. In certain embodiments, the 5′ homologous region of the first DNA fragment is homologous to a 3′ homologous region of a second DNA fragment of the two or more DNA fragments. In certain embodiments, the 3′ homologous region of the first DNA fragment is homologous to a 5′ homologous region of a second DNA fragment of the two or more DNA fragments. In certain embodiments, the nucleotide sequences of the first and the second DNA fragments outside the homologous region(s) are not homologous to each other; are not homologous to a sequence in the Leishmania cell's genome; and/or have no homologies within the respective DNA fragment.

[0056] In certain embodiments, each of the two or more DNA fragments comprises a 5′ homologous region and/or a 3′ homologous region. In certain embodiments, the 5′ homologous region of the each of the two or more DNA fragments is homologous to a 3′ homologous region of another one of the two or more DNA fragments. In certain embodiments, the 3′ homologous region of the each of the two or more DNA fragments is homologous to a 5′ homologous region of another one of the two or more DNA fragments. In certain embodiments, the nucleotide sequences outside the homologous regions in each DNA fragment are not homologous to each other; are not homologous to a sequence in the Leishmania cell's genome; and/or have no homologies within the respective DNA fragment.

[0057] In certain embodiments, the DNA fragment described herein comprises a 5′ homologous region or a 3′ homologous region that is homologous to a region in the chromosome of the Leishmania cell. In certain embodiments, such homologous region allows the integration of the DNA fragment into the chromosome of the Leishmania cell. In certain embodiments, the DNA fragment comprises a 5′ homologous region that is homologous to a 3′ homologous region of another DNA fragment, a region that is outside the homologous regions, and a 3′ homologous region that is homologous to a 5′ homologous region of another DNA fragment.

[0058] In certain embodiments, the two or more DNA fragments, optionally after the two or more DNA fragments are recombined with each other, are suitable for integration into a chromosome of the Leishmania cell. In certain embodiments, the two or more DNA fragments, optionally after the two or more DNA fragments are recombined with each other, are integrated into the chromosome of the Leishmania cell. In certain embodiments, the two or more DNA fragments are integrated in tandem into the paraflagellar rod protein (Pfr) locus. In certain embodiments, the two or more DNA fragments are integrated at the start of the 18S coding region (Ssu-PolI). In certain embodiments, the two or more DNA fragments, before and/or after recombination with each other, are not integrated in a chromosome of the Leishmania cell.

### 5.1.2 Homologous Region

[0059] In certain embodiments, the 5′ homologous region and/or the 3′ homologous region may be 10 to 2000 nucleotides in length. In certain embodiments, the 5′ homologous region and/or the 3′ homologous region may be at least 10 nucleotides, 20 nucleotides, 30 nucleotides, 40 nucleotides, 50 nucleotides, 60 nucleotides, 70 nucleotides, 80 nucleotides, 90 nucleotides, 100 nucleotides, 150 nucleotides, 200 nucleotides, 250 nucleotides, 300 nucleotides, 350 nucleotides, 400 nucleotides, 450 nucleotides, 500 nucleotides, 550 nucleotides, 600 nucleotides, 650 nucleotides, 700 nucleotides, 750 nucleotides, 800 nucleotides, 850 nucleotides, 900 nucleotides, 950 nucleotides, 1000 nucleotides, 1200 nucleotides, 1400 nucleotides, 1600 nucleotides, 1800 nucleotides, 2000 nucleotides, 2200 nucleotides, 2400 nucleotides, 2600 nucleotides, 2800 nucleotides, 3000 nucleotides, 3200 nucleotides, 3400 nucleotides, 3600 nucleotides, 3800 nucleotides, 4000 nucleotides, 4200 nucleotides, 4400 nucleotides, 4600 nucleotides, 4800 nucleotides, or at least 5000 nucleotides in length. In certain embodiments, the 5′ homologous region and/or the 3′ homologous region may be 10 nucleotides, 20 nucleotides, 30 nucleotides, 40 nucleotides, 50 nucleotides, 60 nucleotides, 70 nucleotides, 80 nucleotides, 90 nucleotides, 100 nucleotides, 150 nucleotides, 200 nucleotides, 250 nucleotides, 300 nucleotides, 350 nucleotides, 400 nucleotides, 450 nucleotides, 500 nucleotides, 550 nucleotides, 600 nucleotides, 650 nucleotides, 700 nucleotides, 750 nucleotides, 800 nucleotides, 850 nucleotides, 900 nucleotides, 950 nucleotides, 1000 nucleotides, 1200 nucleotides, 1400 nucleotides, 1600 nucleotides, 1800 nucleotides, 2000 nucleotides, 2200 nucleotides, 2400 nucleotides, 2600 nucleotides, 2800 nucleotides, 3000 nucleotides, 3200 nucleotides, 3400 nucleotides, 3600 nucleotides, 3800 nucleotides, 4000 nucleotides, 4200 nucleotides, 4400 nucleotides, 4600 nucleotides, 4800 nucleotides, or 5000 nucleotides in length. In certain embodiments, the 5′ homologous region and/or the 3′ homologous region may be 200 nucleotides, 250 nucleotides or more than 500 nucleotides in length. In certain embodiments, the 5′ homologous region and/or the 3′ homologous region may be of any length that is described in the Example section.

[0060] In certain embodiments, the 5′ homologous region and/or the 3′ homologous region of the first DNA fragment is at least 10 nucleotides, 20 nucleotides, 30 nucleotides, 40 nucleotides, 50 nucleotides, 100 nucleotides, 150 nucleotides, 200 nucleotides, 250 nucleotides, 300 nucleotides, 350 nucleotides, 400 nucleotides, 450 nucleotides, or at least 500 nucleotides in length. In certain embodiments, the 5′ homologous region and/or the 3′ homologous region of the first DNA fragment is at most 500 nucleotides, 550 nucleotides, 600 nucleotides, 650 nucleotides, 700 nucleotides, 750 nucleotides, 800 nucleotides, 850 nucleotides, 900 nucleotides, 950 nucleotides, 1000 nucleotides, 1200 nucleotides, 1400 nucleotides, 1600 nucleotides, 1800 nucleotides, 2000 nucleotides, 2200 nucleotides, 2400 nucleotides, 2600 nucleotides, 2800 nucleotides, 3000 nucleotides, 3200 nucleotides, 3400 nucleotides, 3600 nucleotides, 3800 nucleotides, 4000 nucleotides, 4200 nucleotides, 4400 nucleotides, 4600 nucleotides, 4800 nucleotides, or at most 5000 nucleotides in length. In certain embodiments, the 5′ homologous region and/or the 3′ homologous region of the first DNA fragment is 10 nucleotide to 50 nucleotides, 50 nucleotide to 100 nucleotides, 100 nucleotide to 150 nucleotides, 150 nucleotide to 200 nucleotides, 200 nucleotide to 250 nucleotides, 250 nucleotide to 300 nucleotides, 300 nucleotide to 350 nucleotides, 350 nucleotide to 400 nucleotides, 400 nucleotide to 450 nucleotides, 450 nucleotide to 500 nucleotides, 500 nucleotide to 550 nucleotides, 550 nucleotide to 600 nucleotides, 600 nucleotide to 650 nucleotides, 650 nucleotide to 700 nucleotides, 700 nucleotide to 750 nucleotides, 750 nucleotide to 800 nucleotides, 800 nucleotide to 850 nucleotides, 850 nucleotide to 900 nucleotides, 900 nucleotide to 950 nucleotides, 950 nucleotide to 1000 nucleotides, 1000 nucleotides to 1200 nucleotides, 1200 nucleotides to 1400 nucleotides, 1400 nucleotides to 1600 nucleotides, 1600 nucleotides to 1800 nucleotides, 1800 nucleotides to 2000 nucleotides, 2000 nucleotides to 2200 nucleotides, 2200 nucleotides to 2400 nucleotides, 2400 nucleotides to 2600 nucleotides, 2600 nucleotides to 2800 nucleotides, 2800 nucleotides to 3000 nucleotides, 3000 nucleotides to 3200 nucleotides, 3200 nucleotides to 3400 nucleotides, 3400 nucleotides to 3600 nucleotides, 3600 nucleotides to 3800 nucleotides, 3800 nucleotides to 4000 nucleotides, 4000 nucleotides to 4200 nucleotides, 4200 nucleotides to 4400 nucleotides, 4400 nucleotides to 4600 nucleotides, 4600 nucleotides to 4800 nucleotides, or 4800 nucleotides to 5000 nucleotides in length.

[0061] In certain embodiments, the 5′ homologous region and/or the 3′ homologous region of the second DNA fragment is at least 10 nucleotides, 20 nucleotides, 30 nucleotides, 40 nucleotides, 50 nucleotides, 100 nucleotides, 150 nucleotides, 200 nucleotides, 250 nucleotides, 300 nucleotides, 350 nucleotides, 400 nucleotides, 450 nucleotides, or at least 500 nucleotides in length. In certain embodiments, the 5′ homologous region and/or the 3′ homologous region of the second DNA fragment is at most 500 nucleotides, 550 nucleotides, 600 nucleotides, 650 nucleotides, 700 nucleotides, 750 nucleotides, 800 nucleotides, 850 nucleotides, 900 nucleotides, 950 nucleotides, 1000 nucleotides, 1200 nucleotides, 1400 nucleotides, 1600 nucleotides, 1800 nucleotides, 2000 nucleotides, 2200 nucleotides, 2400 nucleotides, 2600 nucleotides, 2800 nucleotides, 3000 nucleotides, 3200 nucleotides, 3400 nucleotides, 3600 nucleotides, 3800 nucleotides, 4000 nucleotides, 4200 nucleotides, 4400 nucleotides, 4600 nucleotides, 4800 nucleotides, or at most 5000 nucleotides in length. In certain embodiments, the 5′ homologous region and/or the 3′ homologous region of the second DNA fragment is 10 nucleotide to 50 nucleotides, 50 nucleotide to 100 nucleotides, 100 nucleotide to 150 nucleotides, 150 nucleotide to 200 nucleotides, 200 nucleotide to 250 nucleotides, 250 nucleotide to 300 nucleotides, 300 nucleotide to 350 nucleotides, 350 nucleotide to 400 nucleotides, 400 nucleotide to 450 nucleotides, 450 nucleotide to 500 nucleotides, 500 nucleotide to 550 nucleotides, 550 nucleotide to 600 nucleotides, 600 nucleotide to 650 nucleotides, 650 nucleotide to 700 nucleotides, 700 nucleotide to 750 nucleotides, 750 nucleotide to 800 nucleotides, 800 nucleotide to 850 nucleotides, 850 nucleotide to 900 nucleotides, 900 nucleotide to 950 nucleotides, 950 nucleotide to 1000 nucleotides, 1000 nucleotides to 1200 nucleotides, 1200 nucleotides to 1400 nucleotides, 1400 nucleotides to 1600 nucleotides, 1600 nucleotides to 1800 nucleotides, 1800 nucleotides to 2000 nucleotides, 2000 nucleotides to 2200 nucleotides, 2200 nucleotides to 2400 nucleotides, 2400 nucleotides to 2600 nucleotides, 2600 nucleotides to 2800 nucleotides, 2800 nucleotides to 3000 nucleotides, 3000 nucleotides to 3200 nucleotides, 3200 nucleotides to 3400 nucleotides, 3400 nucleotides to 3600 nucleotides, 3600 nucleotides to 3800 nucleotides, 3800 nucleotides to 4000 nucleotides, 4000 nucleotides to 4200 nucleotides, 4200 nucleotides to 4400 nucleotides, 4400 nucleotides to 4600 nucleotides, 4600 nucleotides to 4800 nucleotides, or 4800 nucleotides to 5000 nucleotides in length.

[0062] In certain embodiments, the 5′ homologous region and/or the 3′ homologous region of all of the two or more DNA fragments is at least 10 nucleotides, 20 nucleotides, 30 nucleotides, 40 nucleotides, 50 nucleotides, 100 nucleotides, 150 nucleotides, 200 nucleotides, 250 nucleotides, 300 nucleotides, 350 nucleotides, 400 nucleotides, 450 nucleotides, or at least 500 nucleotides in length. In certain embodiments, the 5′ homologous region and/or the 3′ homologous region of all of the two or more DNA fragments is at most 500 nucleotides, 550 nucleotides, 600 nucleotides, 650 nucleotides, 700 nucleotides, 750 nucleotides, 800 nucleotides, 850 nucleotides, 900 nucleotides, 950 nucleotides, 1000 nucleotides, 1200 nucleotides, 1400 nucleotides, 1600 nucleotides, 1800 nucleotides, 2000 nucleotides, 2200 nucleotides, 2400 nucleotides, 2600 nucleotides, 2800 nucleotides, 3000 nucleotides, 3200 nucleotides, 3400 nucleotides, 3600 nucleotides, 3800 nucleotides, 4000 nucleotides, 4200 nucleotides, 4400 nucleotides, 4600 nucleotides, 4800 nucleotides, or at most 5000 nucleotides in length. In certain embodiments, the 5′ homologous region and/or the 3′ homologous region of all of the two or more DNA fragments is 10 nucleotide to 50 nucleotides, 50 nucleotide to 100 nucleotides, 100 nucleotide to 150 nucleotides, 150 nucleotide to 200 nucleotides, 200 nucleotide to 250 nucleotides, 250 nucleotide to 300 nucleotides, 300 nucleotide to 350 nucleotides, 350 nucleotide to 400 nucleotides, 400 nucleotide to 450 nucleotides, 450 nucleotide to 500 nucleotides, 500 nucleotide to 550 nucleotides, 550 nucleotide to 600 nucleotides, 600 nucleotide to 650 nucleotides, 650 nucleotide to 700 nucleotides, 700 nucleotide to 750 nucleotides, 750 nucleotide to 800 nucleotides, 800 nucleotide to 850 nucleotides, 850 nucleotide to 900 nucleotides, 900 nucleotide to 950 nucleotides, 950 nucleotide to 1000 nucleotides, 1000 nucleotides to 1200 nucleotides, 1200 nucleotides to 1400 nucleotides, 1400 nucleotides to 1600 nucleotides, 1600 nucleotides to 1800 nucleotides, 1800 nucleotides to 2000 nucleotides, 2000 nucleotides to 2200 nucleotides, 2200 nucleotides to 2400 nucleotides, 2400 nucleotides to 2600 nucleotides, 2600 nucleotides to 2800 nucleotides, 2800 nucleotides to 3000 nucleotides, 3000 nucleotides to 3200 nucleotides, 3200 nucleotides to 3400 nucleotides, 3400 nucleotides to 3600 nucleotides, 3600 nucleotides to 3800 nucleotides, 3800 nucleotides to 4000 nucleotides, 4000 nucleotides to 4200 nucleotides, 4200 nucleotides to 4400 nucleotides, 4400 nucleotides to 4600 nucleotides, 4600 nucleotides to 4800 nucleotides, or 4800 nucleotides to 5000 nucleotides in length.

[0063] In certain embodiments, two homologous regions that are homologous to each other have at least 20%, 25%, 30%, 35%, 40%, 45%, 50%, 55%, 60%, 65%, 70%, 75%, 80%, 85%, 90%, 95%, or 100% sequence identity. In certain embodiments, two homologous regions that are homologous to each other have 20%, 25%, 30%, 35%, 40%, 45%, 50%, 55%, 60%, 65%, 70%, 75%, 80%, 85%, 90%, 95%, or 100% sequence identity. In certain embodiments, two homologous regions have enough level of homology to allow homologous recombination of the corresponding DNA fragments comprising the homologous regions.

[0064] In certain embodiments, the 5′ homologous region of the first DNA fragment and the 3′ homologous region of the second DNA fragment have at least 20%, 25%, 30%, 35%, 40%, 45%, 50%, 55%, 60%, 65%, 70%, 75%, 80%, 85%, 90%, 95%, or 100% sequence identity. In certain embodiments, the 3′ homologous region of the first DNA fragment and the 5′ homologous region of the second DNA fragment have at least 20%, 25%, 30%, 35%, 40%, 45%, 50%, 55%, 60%, 65%, 70%, 75%, 80%, 85%, 90%, 95%, or 100% sequence identity. In certain embodiments, the 5′ homologous region of the first DNA fragment and the 3′ homologous region of the second DNA fragment have 20%, 25%, 30%, 35%, 40%, 45%, 50%, 55%, 60%, 65%, 70%, 75%, 80%, 85%, 90%, 95%, or 100% sequence identity. In certain embodiments, the 3′ homologous region of the first DNA fragment and the 5′ homologous region of the second DNA fragment have 20%, 25%, 30%, 35%, 40%, 45%, 50%, 55%, 60%, 65%, 70%, 75%, 80%, 85%, 90%, 95%, or 100% sequence identity.

### 5.1.3 the DNA Fragments Outside the Homologous Region

[0065] In certain embodiments, the nucleotide sequences of the DNA fragments outside the homologous region are at least 10 nucleotides, 20 nucleotides, 30 nucleotides, 40 nucleotides, 50 nucleotides, 100 nucleotides, 200 nucleotides, 300 nucleotides, 400 nucleotides, 500 nucleotides, 600 nucleotides, 700 nucleotides, 800 nucleotides, 900 nucleotides, 1000 nucleotides, 1200 nucleotides, 1500 nucleotides, 1800 nucleotides, 2000 nucleotides, 2500 nucleotides, 3000 nucleotides, 3500 nucleotides, 4000 nucleotides, 4500 nucleotides, 5000 nucleotides, 6000 nucleotides, 7000 nucleotides, 8000 nucleotides, 9000 nucleotides, 10000 nucleotides, 11000 nucleotides, 12000 nucleotides, 13000 nucleotides, 14000 nucleotides, 15000 nucleotides, 16000 nucleotides, 17000 nucleotides, 18000 nucleotides, 19000 nucleotides, 20000 nucleotides, 25000 nucleotides, 30000 nucleotides, 35000 nucleotides, 40000 nucleotides, 45000 nucleotides, or at least 50000 nucleotides in length. In certain embodiments, the nucleotide sequences of the DNA fragments outside the homologous region are 10 to 50000 nucleotides in length. In certain embodiments, the nucleotide sequences of the DNA fragments outside the homologous region are 50 to 10000 nucleotides in length. In certain embodiments, the nucleotide sequences of the DNA fragments outside the homologous region are 100 to 5000 nucleotides in length. In certain embodiments, the nucleotide sequences of the DNA fragments outside the homologous region are 150 to 2500 nucleotides in length. In certain embodiments, the nucleotide sequences of the DNA fragments outside the homologous region are 250 to 2000 nucleotides in length.

[0066] In certain embodiments, the nucleotide sequence of the first DNA fragment outside the homologous region is at least 10 nucleotides, 20 nucleotides, 30 nucleotides, 40 nucleotides, 50 nucleotides, 100 nucleotides, 200 nucleotides, 300 nucleotides, 400 nucleotides, 500 nucleotides, 600 nucleotides, 700 nucleotides, 800 nucleotides, 900 nucleotides, 1000 nucleotides, 2000 nucleotides, 5000 nucleotides, 10000 nucleotides, 15000 nucleotides, or 20000 nucleotides, 25000 nucleotides, 30000 nucleotides, 35000 nucleotides, 40000 nucleotides, 45000 nucleotides, or at least 50000 nucleotides in length. In certain embodiments, the nucleotide sequences of the first DNA fragment outside the homologous region are 10 to 50000 nucleotides in length. In certain embodiments, the nucleotide sequences of the first DNA fragment outside the homologous region are 50 to 10000 nucleotides in length. In certain embodiments, the nucleotide sequences of the first DNA fragment outside the homologous region are 100 to 5000 nucleotides in length. In certain embodiments, the nucleotide sequences of the first DNA fragment outside the homologous region are 150 to 2500 nucleotides in length. In certain embodiments, the nucleotide sequences of the first DNA fragment outside the homologous region are 250 to 2000 nucleotides in length.

[0067] In certain embodiments, the nucleotide sequence of the second DNA fragment outside the homologous region is at least 10 nucleotides, 20 nucleotides, 30 nucleotides, 40 nucleotides, 50 nucleotides, 100 nucleotides, 200 nucleotides, 300 nucleotides, 400 nucleotides, 500 nucleotides, 600 nucleotides, 700 nucleotides, 800 nucleotides, 900 nucleotides, 1000 nucleotides, 2000 nucleotides, 5000 nucleotides, 10000 nucleotides, 15000 nucleotides, or 20000 nucleotides, 25000 nucleotides, 30000 nucleotides, 35000 nucleotides, 40000 nucleotides, 45000 nucleotides, or at least 50000 nucleotides in length. In certain embodiments, the nucleotide sequences of the second DNA fragment outside the homologous region are 10 to 50000 nucleotides in length. In certain embodiments, the nucleotide sequences of the first DNA fragment outside the homologous region are 50 to 10000 nucleotides in length. In certain embodiments, the nucleotide sequences of the second DNA fragment outside the homologous region are 100 to 5000 nucleotides in length. In certain embodiments, the nucleotide sequences of the second DNA fragment outside the homologous region are 150 to 2500 nucleotides in length. In certain embodiments, the nucleotide sequences of the second DNA fragment outside the homologous region are 250 to 2000 nucleotides in length.

[0068] In certain embodiments, the nucleotide sequences of all of the two or more DNA fragments outside the homologous region are at least 10 nucleotides, 20 nucleotides, 30 nucleotides, 40 nucleotides, 50 nucleotides, 100 nucleotides, 200 nucleotides, 300 nucleotides, 400 nucleotides, 500 nucleotides, 600 nucleotides, 700 nucleotides, 800 nucleotides, 900 nucleotides, 1000 nucleotides, 2000 nucleotides, 5000 nucleotides, 10000 nucleotides, 15000 nucleotides, or 20000 nucleotides, 25000 nucleotides, 30000 nucleotides, 35000 nucleotides, 40000 nucleotides, 45000 nucleotides, or at least 50000 nucleotides in length. In certain embodiments, the nucleotide sequences of all of the two or more DNA fragments outside the homologous region are 10 to 50000 nucleotides in length. In certain embodiments, the nucleotide sequences of the first DNA fragment outside the homologous region are 50 to 10000 nucleotides in length. In certain embodiments, the nucleotide sequences of all of the two or more DNA fragments outside the homologous region are 100 to 5000 nucleotides in length. In certain embodiments, the nucleotide sequences of the second DNA fragment outside the homologous region are 150 to 2500 nucleotides in length. In certain embodiments, the nucleotide sequences of all of the two or more DNA fragments outside the homologous region are 250 to 2000 nucleotides in length.

[0069] As used herein and unless otherwise indicated, when two nucleotide sequences have “no homologies” or are “not homologous to” each other, the two nucleotide sequences have at most 1%, 5%, 10%, 15%, 20%, 25%, 30%, 35%, 40%, 45%, 50%, 55%, 60%, 65%, 70%, 75%, or at most 80% sequence identity over a region of about 100 nucleotides, about 125 nucleotides, about 150 nucleotides, about 175 nucleotides, about 200 nucleotides, about 225 nucleotides, about 250 nucleotides, about 275 nucleotides, about 300 nucleotides, about 325 nucleotides, about 350 nucleotides, about 375 nucleotides, about 400 nucleotides, about 425 nucleotides, about 450 nucleotides, about 475 nucleotides, about 500 nucleotides, about 525 nucleotides, about 550 nucleotides, about 575 nucleotides, about 600 nucleotides, about 625 nucleotides, about 650 nucleotides, about 675 nucleotides, about 700 nucleotides, about 725 nucleotides, about 750 nucleotides, about 775 nucleotides, about 800 nucleotides, about 825 nucleotides, about 850 nucleotides, about 875 nucleotides, about 900 nucleotides, about 925 nucleotides, about 950 nucleotides, about 975 nucleotides, about 1000 nucleotides, about 1025 nucleotides, about 1050 nucleotides, about 1075 nucleotides, or about 2000 nucleotides. In certain embodiments, the two nucleotide sequences may have regions with 90% or higher sequence identity, and such regions are at most about 10 nucleotide, about 20 nucleotide, about 30 nucleotide, or at most about 40 nucleotides in length. In certain embodiments, the two nucleotide sequences may have at most 70% or 80% sequence identity over a region of about 20 nucleotides, about 30 nucleotides, about 40 nucleotides, about 50 nucleotides, about 60 nucleotides, about 70 nucleotides, about 80 nucleotides, about 90 nucleotides, about 100 nucleotides, about 125 nucleotides, about 150 nucleotides, about 175 nucleotides, about 200 nucleotides, about 225 nucleotides, about 250 nucleotides, about 275 nucleotides, about 300 nucleotides, about 325 nucleotides, about 350 nucleotides, about 375 nucleotides, about 400 nucleotides, about 425 nucleotides, about 450 nucleotides, about 475 nucleotides, or about 500 nucleotides. In certain embodiments, the level of homology in the two nucleotide sequences is not enough to allow homologous recombination of the two nucleotide sequences. In certain embodiments, the level of homology in the two nucleotide sequences may allow at most 1, 2, 3, 4, 5, 6, 7, 8, 9, or 10 undesired recombination events between the two nucleotide sequences per 10,000 copies of nucleotide sequences per 2, 3, 4, 5, 6, 7, 8, 9, 10, 11, 12, 13, 14, or 15 days of incubation.

[0070] (i) The First and the Second DNA Fragments are not Homologous to Each Other Outside the 5′ and/or 3′ Homologous Region(s)

[0071] In certain embodiments, the nucleotide sequences of the first and the second DNA fragments are not homologous to each other outside the homologous region(s). In certain embodiments, the nucleotide sequences of the first and the second DNA fragments outside the homologous region(s) may have at most 1%, 5%, 10%, 15%, 20%, 25%, 30%, 35%, 40%, 45%, 50%, 55%, 60%, 65%, 70%, 75%, or at most 80% sequence identity over a region of about 100 nucleotides, about 125 nucleotides, about 150 nucleotides, about 175 nucleotides, about 200 nucleotides, about 225 nucleotides, about 250 nucleotides, about 275 nucleotides, about 300 nucleotides, about 325 nucleotides, about 350 nucleotides, about 375 nucleotides, about 400 nucleotides, about 425 nucleotides, about 450 nucleotides, about 475 nucleotides, about 500 nucleotides, about 525 nucleotides, about 550 nucleotides, about 575 nucleotides, about 600 nucleotides, about 625 nucleotides, about 650 nucleotides, about 675 nucleotides, about 700 nucleotides, about 725 nucleotides, about 750 nucleotides, about 775 nucleotides, about 800 nucleotides, about 825 nucleotides, about 850 nucleotides, about 875 nucleotides, about 900 nucleotides, about 925 nucleotides, about 950 nucleotides, about 975 nucleotides, about 1000 nucleotides, about 1025 nucleotides, about 1050 nucleotides, about 1075 nucleotides, or about 2000 nucleotides. In certain embodiments, the nucleotide sequences of the first and the second DNA fragments outside the homologous region(s) may have regions with 90% or higher sequence identity, and such regions are at most about 10 nucleotide, about 20 nucleotide, about 30 nucleotide, or at most about 40 nucleotides in length. In certain embodiments, the nucleotide sequences of the first and the second DNA fragments outside the homologous region(s) may have at most 70% or 80% sequence identity over a region of about 20 nucleotides, about 30 nucleotides, about 40 nucleotides, about 50 nucleotides, about 60 nucleotides, about 70 nucleotides, about 80 nucleotides, about 90 nucleotides, about 100 nucleotides, about 125 nucleotides, about 150 nucleotides, about 175 nucleotides, about 200 nucleotides, about 225 nucleotides, about 250 nucleotides, about 275 nucleotides, about 300 nucleotides, about 325 nucleotides, about 350 nucleotides, about 375 nucleotides, about 400 nucleotides, about 425 nucleotides, about 450 nucleotides, about 475 nucleotides, or about 500 nucleotides. In certain embodiments, the level of homology in the nucleotide sequences of the first and the second DNA fragments outside the homologous region is not enough to allow homologous recombination of the DNA fragments in the regions that are outside the homologous region. In certain embodiments, the level of homology in the nucleotide sequences of the first and the second DNA fragments outside the homologous region may allow at most 1, 2, 3, 4, 5, 6, 7, 8, 9, or at most 10 undesired recombination events between the first and the second DNA fragments in the regions that are outside the homologous region per 10,000 copies of each of the first and the second DNA fragments per 2, 3, 4, 5, 6, 7, 8, 9, 10, 11, 12, 13, 14, or 15 days of incubation.

[0072] (ii) All DNA Fragments are not Homologous to Each Other Outside the 5′ and/or 3′ Homologous Region(s)

[0073] In certain embodiments, the nucleotide sequences of all the DNA fragments are not homologous to each other outside the homologous region(s). In certain embodiments, the nucleotide sequences of all the DNA fragments outside the homologous region(s) may have at most 1%, 5%, 10%, 15%, 20%, 25%, 30%, 35%, 40%, 45%, 50%, 55%, 60%, 65%, 70%, 75%, or at most 80% sequence identity over a region of about 100 nucleotides, about 125 nucleotides, about 150 nucleotides, about 175 nucleotides, about 200 nucleotides, about 225 nucleotides, about 250 nucleotides, about 275 nucleotides, about 300 nucleotides, about 325 nucleotides, about 350 nucleotides, about 375 nucleotides, about 400 nucleotides, about 425 nucleotides, about 450 nucleotides, about 475 nucleotides, about 500 nucleotides, about 525 nucleotides, about 550 nucleotides, about 575 nucleotides, about 600 nucleotides, about 625 nucleotides, about 650 nucleotides, about 675 nucleotides, about 700 nucleotides, about 725 nucleotides, about 750 nucleotides, about 775 nucleotides, about 800 nucleotides, about 825 nucleotides, about 850 nucleotides, about 875 nucleotides, about 900 nucleotides, about 925 nucleotides, about 950 nucleotides, about 975 nucleotides, about 1000 nucleotides, about 1025 nucleotides, about 1050 nucleotides, about 1075 nucleotides, or about 2000 nucleotides. In certain embodiments, the nucleotide sequences of all the DNA fragments outside the homologous region(s) may have regions with 90% or higher sequence identity, and such regions are at most about 10 nucleotide, about 20 nucleotide, about 30 nucleotide, or at most about 40 nucleotides in length. In certain embodiments, the nucleotide sequences of all the DNA fragments outside the homologous region(s) may have at most 70% or 80% sequence identity over a region of about 20 nucleotides, about 30 nucleotides, about 40 nucleotides, about 50 nucleotides, about 60 nucleotides, about 70 nucleotides, about 80 nucleotides, about 90 nucleotides, about 100 nucleotides, about 125 nucleotides, about 150 nucleotides, about 175 nucleotides, about 200 nucleotides, about 225 nucleotides, about 250 nucleotides, about 275 nucleotides, about 300 nucleotides, about 325 nucleotides, about 350 nucleotides, about 375 nucleotides, about 400 nucleotides, about 425 nucleotides, about 450 nucleotides, about 475 nucleotides, or about 500 nucleotides. In certain embodiments, the level of homology in the nucleotide sequences of all the DNA fragments outside the homologous region is not enough to allow homologous recombination of the DNA fragments in the regions that are outside the homologous region. In certain embodiments, the level of homology in the nucleotide sequences of all the DNA fragments outside the homologous region may allow at most 1, 2, 3, 4, 5, 6, 7, 8, 9, or at most 10 undesired recombination events of the DNA fragments in the regions that are outside the homologous region per 10,000 copies of each of the DNA fragments per 2, 3, 4, 5, 6, 7, 8, 9, 10, 11, 12, 13, 14, or 15 days of incubation.

[0074] (iii) The First and the Second DNA Fragments Outside the 5′ and/or 3′ Homologous Region(s) are not Homologous to a Sequence in the Leishmania Cell's Genome

[0075] In certain embodiments, the nucleotide sequences of the first and the second DNA fragments outside the homologous region(s) are not homologous to a sequence in the Leishmania cell's genome. In certain embodiments, the nucleotide sequences of the first and the second DNA fragments outside the homologous region(s) and the Leishmania cell's genome may have at most 1%, 5%, 10%, 15%, 20%, 25%, 30%, 35%, 40%, 45%, 50%, 55%, 60%, 65%, 70%, 75%, or at most 80% sequence identity over a region of about 100 nucleotides, about 125 nucleotides, about 150 nucleotides, about 175 nucleotides, about 200 nucleotides, about 225 nucleotides, about 250 nucleotides, about 275 nucleotides, about 300 nucleotides, about 325 nucleotides, about 350 nucleotides, about 375 nucleotides, about 400 nucleotides, about 425 nucleotides, about 450 nucleotides, about 475 nucleotides, about 500 nucleotides, about 525 nucleotides, about 550 nucleotides, about 575 nucleotides, about 600 nucleotides, about 625 nucleotides, about 650 nucleotides, about 675 nucleotides, about 700 nucleotides, about 725 nucleotides, about 750 nucleotides, about 775 nucleotides, about 800 nucleotides, about 825 nucleotides, about 850 nucleotides, about 875 nucleotides, about 900 nucleotides, about 925 nucleotides, about 950 nucleotides, about 975 nucleotides, about 1000 nucleotides, about 1025 nucleotides, about 1050 nucleotides, about 1075 nucleotides, or about 2000 nucleotides. In certain embodiments, the nucleotide sequences of the first and the second DNA fragments outside the homologous region(s) and the Leishmania cell's genome may have regions with 90% or higher sequence identity, and such regions are at most about 10 nucleotide, about 20 nucleotide, about 30 nucleotide, or at most about 40 nucleotides in length. In certain embodiments, the nucleotide sequences of the first and the second DNA fragments outside the homologous region(s) and the Leishmania cell's genome may have at most 70% or 80% sequence identity over a region of about 20 nucleotides, about 30 nucleotides, about 40 nucleotides, about 50 nucleotides, about 60 nucleotides, about 70 nucleotides, about 80 nucleotides, about 90 nucleotides, about 100 nucleotides, about 125 nucleotides, about 150 nucleotides, about 175 nucleotides, about 200 nucleotides, about 225 nucleotides, about 250 nucleotides, about 275 nucleotides, about 300 nucleotides, about 325 nucleotides, about 350 nucleotides, about 375 nucleotides, about 400 nucleotides, about 425 nucleotides, about 450 nucleotides, about 475 nucleotides, or about 500 nucleotides. In certain embodiments, the level of homology in the first and the second DNA fragments outside the homologous region and the Leishmania cell's genome is not enough to allow homologous recombination of the DNA fragments and the Leishmania cell's genome in the regions that are outside the homologous region. In certain embodiments, the level of homology in the first and the second DNA fragments outside the homologous region and the Leishmania cell's genome may allow at most 1, 2, 3, 4, 5, 6, 7, 8, 9, or at most 10 undesired recombination events of the DNA fragments and the Leishmania cell's genome in the regions that are outside the homologous region per 10,000 copies of each of the first and the second DNA fragments per 2, 3, 4, 5, 6, 7, 8, 9, 10, 11, 12, 13, 14, or 15 days of incubation.

[0076] (iv) All the DNA Fragments Outside the 5′ and/or 3′ Homologous Region(s) are not Homologous to a Sequence in the Leishmania Cell's Genome

[0077] In certain embodiments, the nucleotide sequences of all the DNA fragments outside the homologous region(s) are not homologous to a sequence in the Leishmania cell's genome. In certain embodiments, the nucleotide sequences of the first and the second DNA fragments outside the homologous region(s) and the Leishmania cell's genome may have at most 1%, 5%, 10%, 15%, 20%, 25%, 30%, 35%, 40%, 45%, 50%, 55%, 60%, 65%, 70%, 75%, or at most 80% sequence identity over a region of about 100 nucleotides, about 125 nucleotides, about 150 nucleotides, about 175 nucleotides, about 200 nucleotides, about 225 nucleotides, about 250 nucleotides, about 275 nucleotides, about 300 nucleotides, about 325 nucleotides, about 350 nucleotides, about 375 nucleotides, about 400 nucleotides, about 425 nucleotides, about 450 nucleotides, about 475 nucleotides, about 500 nucleotides, about 525 nucleotides, about 550 nucleotides, about 575 nucleotides, about 600 nucleotides, about 625 nucleotides, about 650 nucleotides, about 675 nucleotides, about 700 nucleotides, about 725 nucleotides, about 750 nucleotides, about 775 nucleotides, about 800 nucleotides, about 825 nucleotides, about 850 nucleotides, about 875 nucleotides, about 900 nucleotides, about 925 nucleotides, about 950 nucleotides, about 975 nucleotides, about 1000 nucleotides, about 1025 nucleotides, about 1050 nucleotides, about 1075 nucleotides, or about 2000 nucleotides. In certain embodiments, the nucleotide sequences of all the DNA fragments outside the homologous region(s) and the Leishmania cell's genome may have regions with 90% or higher sequence identity, and such regions are at most about 10 nucleotide, about 20 nucleotide, about 30 nucleotide, or at most about 40 nucleotides in length. In certain embodiments, the nucleotide sequences of all the DNA fragments outside the homologous region(s) and the Leishmania cell's genome may have at most 70% or 80% sequence identity over a region of about 20 nucleotides, about 30 nucleotides, about 40 nucleotides, about 50 nucleotides, about 60 nucleotides, about 70 nucleotides, about 80 nucleotides, about 90 nucleotides, about 100 nucleotides, about 125 nucleotides, about 150 nucleotides, about 175 nucleotides, about 200 nucleotides, about 225 nucleotides, about 250 nucleotides, about 275 nucleotides, about 300 nucleotides, about 325 nucleotides, about 350 nucleotides, about 375 nucleotides, about 400 nucleotides, about 425 nucleotides, about 450 nucleotides, about 475 nucleotides, or about 500 nucleotides. In certain embodiments, the level of homology in the nucleotide sequences of all the DNA fragments outside the homologous region and the Leishmania cell's genome is not enough to allow homologous recombination of the DNA fragments and the Leishmania cell's genome in the regions that are outside the homologous region. In certain embodiments, the level of homology in the nucleotide sequences of all the DNA fragments outside the homologous region and the Leishmania cell's genome may allow at most 1, 2, 3, 4, 5, 6, 7, 8, 9, or at most 10 undesired recombination events of the DNA fragments and the Leishmania cell's genome in the regions that are outside the homologous region per 10,000 copies of each of the DNA fragments per 2, 3, 4, 5, 6, 7, 8, 9, 10, 11, 12, 13, 14, or 15 days of incubation.

[0078] (v) The First and the Second DNA Fragments have No Homologies within the Respective DNA Fragment

[0079] In certain embodiments, the nucleotide sequences of the first and the second DNA fragments have no homologies within the respective DNA fragment. In certain embodiments, the nucleotide sequences of the first and the second DNA fragments within the respective DNA fragment may contain nucleotide sequences that have at most 1%, 5%, 10%, 15%, 20%, 25%, 30%, 35%, 40%, 45%, 50%, 55%, 60%, 65%, 70%, 75%, or at most 80% sequence identity over a region of about 100 nucleotides, about 125 nucleotides, about 150 nucleotides, about 175 nucleotides, about 200 nucleotides, about 225 nucleotides, about 250 nucleotides, about 275 nucleotides, about 300 nucleotides, about 325 nucleotides, about 350 nucleotides, about 375 nucleotides, about 400 nucleotides, about 425 nucleotides, about 450 nucleotides, about 475 nucleotides, about 500 nucleotides, about 525 nucleotides, about 550 nucleotides, about 575 nucleotides, about 600 nucleotides, about 625 nucleotides, about 650 nucleotides, about 675 nucleotides, about 700 nucleotides, about 725 nucleotides, about 750 nucleotides, about 775 nucleotides, about 800 nucleotides, about 825 nucleotides, about 850 nucleotides, about 875 nucleotides, about 900 nucleotides, about 925 nucleotides, about 950 nucleotides, about 975 nucleotides, about 1000 nucleotides, about 1025 nucleotides, about 1050 nucleotides, about 1075 nucleotides, or about 2000 nucleotides. In certain embodiments, the nucleotide sequences of the first and the second DNA fragments within the respective DNA fragment may contain nucleotide sequences with 90% or higher sequence identity, and such regions are at most about 10 nucleotide, about 20 nucleotide, about 30 nucleotide, or at most about 40 nucleotides in length. In certain embodiments, the nucleotide sequences of the first and the second DNA fragments within the respective DNA fragment may contain nucleotide sequences that have at most 70% or 80% sequence identity over a region of about 20 nucleotides, about 30 nucleotides, about 40 nucleotides, about 50 nucleotides, about 60 nucleotides, about 70 nucleotides, about 80 nucleotides, about 90 nucleotides, about 100 nucleotides, about 125 nucleotides, about 150 nucleotides, about 175 nucleotides, about 200 nucleotides, about 225 nucleotides, about 250 nucleotides, about 275 nucleotides, about 300 nucleotides, about 325 nucleotides, about 350 nucleotides, about 375 nucleotides, about 400 nucleotides, about 425 nucleotides, about 450 nucleotides, about 475 nucleotides, or about 500 nucleotides. In certain embodiments, the level of homology in the nucleotide sequences of the first and the second DNA fragments within the respective DNA fragment is not enough to allow homologous recombination of the DNA fragments within itself. In certain embodiments, the level of homology in the nucleotide sequences of the first and the second DNA fragments within the respective DNA fragment may allow at most 1, 2, 3, 4, 5, 6, 7, 8, 9, or at most 10 undesired recombination events within the DNA fragment itself per 10,000 copies of the DNA fragment per 2, 3, 4, 5, 6, 7, 8, 9, 10, 11, 12, 13, 14, or 15 days of incubation.

[0080] (vi) All the DNA Fragments have No Homologies within the Respective DNA Fragment

[0081] In certain embodiments, the nucleotide sequences of all the DNA fragments have no homologies within the respective DNA fragment. In certain embodiments, the nucleotide sequences of all the DNA fragments within the respective DNA fragment may contain nucleotide sequences that have at most 1%, 5%, 10%, 15%, 20%, 25%, 30%, 35%, 40%, 45%, 50%, 55%, 60%, 65%, 70%, 75%, or at most 80% sequence identity over a region of about 100 nucleotides, about 125 nucleotides, about 150 nucleotides, about 175 nucleotides, about 200 nucleotides, about 225 nucleotides, about 250 nucleotides, about 275 nucleotides, about 300 nucleotides, about 325 nucleotides, about 350 nucleotides, about 375 nucleotides, about 400 nucleotides, about 425 nucleotides, about 450 nucleotides, about 475 nucleotides, about 500 nucleotides, about 525 nucleotides, about 550 nucleotides, about 575 nucleotides, about 600 nucleotides, about 625 nucleotides, about 650 nucleotides, about 675 nucleotides, about 700 nucleotides, about 725 nucleotides, about 750 nucleotides, about 775 nucleotides, about 800 nucleotides, about 825 nucleotides, about 850 nucleotides, about 875 nucleotides, about 900 nucleotides, about 925 nucleotides, about 950 nucleotides, about 975 nucleotides, about 1000 nucleotides, about 1025 nucleotides, about 1050 nucleotides, about 1075 nucleotides, or about 2000 nucleotides. In certain embodiments, the nucleotide sequences of all the DNA fragments within the respective DNA fragment may contain nucleotide sequences with 90% or higher sequence identity, and such regions are at most about 10 nucleotide, about 20 nucleotide, about 30 nucleotide, or at most about 40 nucleotides in length. In certain embodiments, the nucleotide sequences of all the DNA fragments within the respective DNA fragment may contain nucleotide sequences that have at most 70% or 80% sequence identity over a region of about 20 nucleotides, about 30 nucleotides, about 40 nucleotides, about 50 nucleotides, about 60 nucleotides, about 70 nucleotides, about 80 nucleotides, about 90 nucleotides, about 100 nucleotides, about 125 nucleotides, about 150 nucleotides, about 175 nucleotides, about 200 nucleotides, about 225 nucleotides, about 250 nucleotides, about 275 nucleotides, about 300 nucleotides, about 325 nucleotides, about 350 nucleotides, about 375 nucleotides, about 400 nucleotides, about 425 nucleotides, about 450 nucleotides, about 475 nucleotides, or about 500 nucleotides. In certain embodiments, the level of homology in the nucleotide sequences of all the fragments within the respective DNA fragment is not enough to allow homologous recombination of the DNA fragments within itself. In certain embodiments, the level of homology in the nucleotide sequences of all the DNA fragments within the respective DNA fragment may allow at most 1, 2, 3, 4, 5, 6, 7, 8, 9, or at most 10 undesired recombination events within the DNA fragment itself per 10,000 copies of the DNA fragment per 2, 3, 4, 5, 6, 7, 8, 9, 10, 11, 12, 13, 14, or 15 days of incubation.

[0082] In certain embodiments, the nucleotide sequences of the first and the second DNA fragments outside the homologous region(s) have no repetitive sequences.

[0083] In certain embodiments, the number of DNA fragments is at least 2, 3, 4, 5, 6, 7, 8, 9, 10, 11, 12, 13, 14, 15, 16, 17, 18, 19, 20, 21, 22, 23, 24, or at least 25. In certain embodiments, the number of DNA fragments is 2, 3, 4, 5, 6, 7, 8, 9, 10, 11, 12, 13, 14, 15, 16, 17, 18, 19, 20, 21, 22, 23, 24, 25, 26, 27, 28, 29, 30, 31, 32, 33, 34, 35, 36, 37, 37, 39, 40, 41, 42, 43, 44, 45, 46, 47, 48, 49, or 50.

### 5.1.4 Translation Product of the DNA Fragments

[0084] In certain embodiments, the nucleotide sequences of the two or more DNA fragments outside the homologous region are selected from a group consisting of intergenic regions (IRs), untranslated regions (UTRs), and open reading frames (ORFs) encoding polypeptides. In certain embodiments, the nucleotide sequences of the DNA fragments outside the homologous region are selected from a group consisting of intergenic regions (IRs), untranslated regions (UTRs), and open reading frames (ORFs) that are described in the Example section. In certain embodiments, the IRs, UTRs and ORFs are devoid of homologous sequences within itself, and/or homologous sequences to one another.

[0085] In certain embodiments, the nucleotide sequences of the DNA fragments outside the homologous region are ORFs that encode target polypeptides as described in Section 5.4. In certain embodiments, the nucleotide sequences of the DNA fragments outside the homologous region are ORFs that encode enzymes related to the production of the target polypeptides. Non-limiting exemplary enzymes may be found in International Publication No. WO2019/002512 A2, incorporated by reference in its entirety herein) and International Application entitled “Glycoengineering Using Leishmania Cells” filed even date herewith. In certain embodiments, the nucleotide sequences of the DNA fragments outside the homologous region are ORFs that encode heterologous glycosyltransferases. In certain embodiments, the nucleotide sequences of the DNA fragments outside the homologous region may be transcribed to RNA products, for example ribozymes, regulating RNA, ncRNA, and crisprRNA). In certain embodiments, the nucleotide sequences of the DNA fragments outside the homologous region may be ORFs that encode polypeptides having the function that relates to catalyzing metabolic reactions and DNA replication, responding to stimuli, transporting molecules from one location to another, providing structure to cells and organisms, aggregation and adhesion to other cells, localization of molecules, utilization of carbon, carbohydrates, nitrogen, phosphorus and sulfur, biomineralization, growth, development and mitosis of cells, locomotion, biological regulation, protein folding, and/or toxins.

[0086] In certain embodiments, the nucleotide sequences of the two or more DNA fragments outside the homologous region encode the same polypeptide. In certain embodiments, the Leishmania cell is capable of expressing multiple copies of the same polypeptide. In certain embodiments, the method provided herein increases the expression level of the polypeptide. In certain embodiments, using multiple DNA fragments encoding the same polypeptide may increase the expression level of the polypeptide in comparison to the resulting expression level of the approach using one DNA fragment encoding the polypeptide.
[0087] (i) Nucleotide sequence resulted from the homologous recombination of the DNA fragments

[0088] In certain embodiments, the homologous recombination of the DNA fragments results in a nucleotide sequence that is 50 nucleotides to 100 nucleotides, 100 nucleotides to 500 nucleotides, 500 nucleotides to 1000 nucleotides, 1000 nucleotides to 5000 nucleotides, 5000 nucleotides to 10000 nucleotides, 10000 nucleotides to 15000 nucleotides, 15000 nucleotides to 20000 nucleotides, 20000 nucleotides to 25000 nucleotides, 25000 nucleotides to 30000 nucleotides, 30000 nucleotides to 35000 nucleotides, 35000 nucleotides to 40000 nucleotides, 40000 nucleotides to 45000 nucleotides, 45000 nucleotides to 50000 nucleotides, 50000 nucleotides to 55000 nucleotides, 55000 nucleotides to 60000 nucleotides, 60000 nucleotides to 65000 nucleotides, 65000 nucleotides to 70000 nucleotides, 70000 nucleotides to 75000 nucleotides, or 75000 nucleotides to 80000 nucleotides in length.

[0089] In certain embodiments, the homologous recombination of the DNA fragments results in a nucleotide sequence comprising at least 50%, 60%, 70%, 80%, 90% or 100% of genetic information encoded by the two or more DNA fragments. In certain embodiments, the nucleotide sequence resulted from the homologous recombination of the DNA fragments contains all the genetic information encoded in the two or more DNA fragments.

### 5.1.5 Undesired Crossing Out and/or Crossing Over

[0090] In general, the methods provided herein are capable of avoiding undesired genetic recombination events. In certain embodiments, the undesired genetic recombination events include crossing over and crossing out. In certain embodiments, the undesired genetic recombination events may be single-strand annealing (SSA) or micro homology mediated end joining (MMEJ) and non-homologous end joining (NHEJ) (Zhang (2019) Single-Strand Annealing Plays a Major Role in Double-Strand DNA Break Repair following CRISPR-Cas9 Cleavage in Leishmania. doi: 10.1128/mSphere.00408-19.) In certain embodiments, undesired crossing out and/or crossing over may lead to omission of genetic information of the DNA fragments in the nucleotide sequence resulted from the homologous recombination of the DNA fragments. In certain embodiments, undesired crossing out and/or crossing over may lead to omission of genetic information of the chromosomal endogenous DNA.

[0091] In certain embodiments, undesired crossing out and/or crossing over may be detected using gene sequencing technologies known in the art. In certain embodiments, undesired crossing out and/or crossing over may be detected by phenotypical testing of the resulting genetically engineered Leishmania cells, for example by testing of the activity of an enzyme that is encoded by one or more DNA fragments used in the method described herein. In certain embodiments, undesired crossing out and/or crossing over may be detected using methods as described in the Assay and Example sections of this application.

[0092] In certain embodiments, the method described herein results in low level of undesired crossing out and/or crossing over. In certain embodiments, the undesired crossing out and/or crossing over occurs in at most 0.01%, 0.05%, 0.1%, 0.5%, 1%, 2%, 3%, 4%, 5%, 6%, 7%, 8%, 9% or at most 10% of the Leishmania cells over a period of at least 1 day, 2 days, 3 days, 4 days, 5 days, 6 days, 7 days, 8 days, 9 days, or at least 10 days. In certain embodiments, the undesired crossing out and/or crossing over occurs in about 0.01%, 0.05%, 0.1%, 0.5%, 1%, 2%, 3%, 4%, 5%, 6%, 7%, 8%, 9% or about 10% of the Leishmania cells over a period of at least 1 day, 2 days, 3 days, 4 days, 5 days, 6 days, 7 days, 8 days, 9 days, or at least 10 days.

[0093] In certain embodiments, the undesired crossing out and/or crossing over occurs in at most 0.01%, 0.05%, 0.1%, 0.5%, 1%, 2%, 3%, 4%, 5%, 6%, 7%, 8%, 9% or at most 10% of the Leishmania cells over a period of 1 day, 2 days, 3 days, 4 days, 5 days, 6 days, 7 days, 8 days, 9 days, or 10 days. In certain embodiments, the undesired crossing out and/or crossing over occurs in about 0.01%, 0.05%, 0.1%, 0.5%, 1%, 2%, 3%, 4%, 5%, 6%, 7%, 8%, 9% or about 10% of the Leishmania cells over a period of 1 day, 2 days, 3 days, 4 days, 5 days, 6 days, 7 days, 8 days, 9 days, or 10 days.

[0094] In certain embodiments, the undesired crossing out and/or crossing over occurs in at most 0.01%, 0.05%, 0.1%, 0.5%, 1%, 2%, 3%, 4%, 5%, 6%, 7%, 8%, 9% or at most 10% of the Leishmania cells over at least 1, 2, 3, 4, 5, 6, 7, 8, 9, or at least 10 cell divisions. In certain embodiments, the undesired crossing out and/or crossing over occurs in about 0.01%, 0.05%, 0.1%, 0.5%, 1%, 2%, 3%, 4%, 5%, 6%, 7%, 8%, 9% or about 10% of the Leishmania cells over at least 1, 2, 3, 4, 5, 6, 7, 8, 9, or at least 10 cell divisions.

[0095] In certain embodiments, the undesired crossing out and/or crossing over occurs in at most 0.01%, 0.05%, 0.1%, 0.5%, 1%, 2%, 3%, 4%, 5%, 6%, 7%, 8%, 9% or at most 10% of the Leishmania cells over 1, 2, 3, 4, 5, 6, 7, 8, 9, or 10 cell divisions. In certain embodiments, the undesired crossing out and/or crossing over occurs in about 0.01%, 0.05%, 0.1%, 0.5%, 1%, 2%, 3%, 4%, 5%, 6%, 7%, 8%, 9% or about 10% of the Leishmania cells over 1, 2, 3, 4, 5, 6, 7, 8, 9, or 10 cell divisions.

### 5.1.6 Chromosomal Integration

[0096] In certain embodiments, the two or more DNA fragments are suitable for integration in the chromosome of the Leishmania cell.

[0097] In certain embodiments, the two or more DNA fragments are integrated into the chromosomes of the Leishmania cell. In certain embodiments, one of the DNA fragments comprises a 5′ homologous region that is homologous to a region in the chromosome of the Leishmania cell, and a 3′ homologous region that is homologous to a 5′ homologous region of another DNA fragment. In certain embodiments, one of the DNA fragments comprises a 3′ homologous region that is homologous to another region in the chromosome of the Leishmania cell, and a 5′ homologous region that is homologous to a 3′ homologous region of another DNA fragment. In certain embodiments, the homologous regions that are homologous to regions in the chromosome of the Leishmania cell allow the integration of the DNA fragments into the chromosome of the Leishmania cell. Non-limiting examples of the chromosomal integration described herein may be found in the Example section and illustrated in at least FIGS. 1A, 3B, 4, 6B, and 8A.

### 5.1.7 Extrachromosomal Plasmid

[0098] In certain embodiments, the two or more DNA fragments are not integrated in the chromosome of the Leishmania cell. In certain embodiments, the homologous recombination of the two or more DNA fragments results in a circular plasmid. In certain embodiment, the circular plasmid comprises a cos site. In certain embodiment, the circular plasmid is a cosmid. In certain embodiment, the plasmid is an Escherichia coli cosmid. Non-limiting examples of the extrachromosomal plasmid described herein include the Escherichia coli cosmid as described in Example 6 and illustrated in at least FIG. 11A.

### 5.1.8 Introduction of a DNA Fragment into Host Cells

[0099] Any method known in the art can be used to introduce a DNA fragment (e.g., a gene fragment thereof) into the host cell, e.g., a Leishmania cell.

[0100] In certain embodiments, a DNA fragment is introduced into the host cells described herein using transfection, infection, or electroporation, chemical transformation by heat shock, natural transformation, phage transduction, or conjugation. In a further embodiment, a DNA fragment is introduced into integrated site-specifically into the host cell genome by homologous recombination.

[0101] In certain embodiments, a DNA fragment is introduced into the host cells described herein using a plasmid, e.g., a DNA fragment is expressed in the host cells by a plasmid (e.g., an expression vector), and the plasmid is introduced into the modified host cells by transfection, infection, or electroporation, chemical transformation by heat shock, natural transformation, phage transduction, or conjugation. In a specific embodiment, said plasmid is introduced into the modified host cells by stable transfection.

[0102] In certain embodiments, the two or more DNA fragments are introduced by transfection. In certain embodiments, the two or more DNA fragments are introduced concurrently.

### 5.1.9 Methods of Culturing Cells

[0103] Provided herein are methods for culturing host cells, for example Leishmania host cells. In one embodiment, host cells are cultured using any of the standard culturing techniques known in the art. For example, cells are routinely grown in rich media like Brain Heart Infusion, Trypticase Soy Broth or Yeast Extract, all containing 5 μg/ml Hemin. Additionally, incubation is done at 26° C. in the dark as static or shaking cultures for 2-3 days. In some embodiments, cultures of recombinant cell lines contain the appropriate selective agents. Non-limiting exemplary selective agents are provided in Table 1. In some embodiments, cultures contain Biopterin at a final concentration of 10 μM to support growth. In certain embodiments, host cells may be cultured using the methods as described in the Assay and Examples Sections.

### 5.2 Leishmania Cell

[0104] Also provided herein are genetically engineered Leishmania cells. In certain embodiments, the Leishmania cells are genetically engineered using the method described herein in Section 5.1. In certain embodiments, the Leishmania cell is recombinantly engineered using the method described herein repeatedly. In certain embodiments, the Leishmania cells described herein may be used to express the DNA fragments as described in Section 5.1.1. In certain embodiments, the Leishmania cells described herein may be used as an expression system as described in Section 5.3. In certain embodiments, the Leishmania cells described herein may be used to make a polypeptide as described in Section 5.4.

### 5.2.1 Genetically Engineered Leishmania Cells

[0105] In certain embodiments, the Leishmania cells are genetically engineered such that they may be used to express the ORFs of the DNA fragments. In certain embodiments, the DNA fragments are integrated into the chromosomes of the Leishmania cell. In certain embodiments, the DNA fragments are not integrated into the chromosomes of the Leishmania cell. In certain embodiments, the homologous recombination of the DNA fragments are circularized to an extrachromosomal plasmid. In certain embodiment, the plasmid is a cosmid. In certain embodiment, the plasmid is an E. coli cosmid.

### 5.2.2 Leishmania and Kinetoplastida Strains

[0106] In certain embodiments, the Leishmania cell is a Leishmania tarentolae cell. In certain embodiments, the Leishmania cell is a Leishmania aethiopica cell. In certain embodiments, the Leishmania cell is part of the Leishmania aethiopica species complex. In certain embodiments, the Leishmania cell is a Leishmania aristidesi cell. In certain embodiments, the Leishmania cell is a Leishmania deanei cell. In certain embodiments, the Leishmania cell is part of the Leishmania donovani species complex. In certain embodiments, the Leishmania cell is a Leishmania donovani cell. In certain embodiments, the Leishmania cell is a Leishmania chagasi cell. In certain embodiments, the Leishmania cell is a Leishmania infantum cell. In certain embodiments, the Leishmania cell is a Leishmania hertigi cell. In certain embodiments, the Leishmania cell is part of the Leishmania major species complex. In certain embodiments, the Leishmania cell is a Leishmania major cell. In certain embodiments, the Leishmania cell is a Leishmania martiniquensis cell. In certain embodiments, the Leishmania cell is part of the Leishmania mexicana species complex. In certain embodiments, the Leishmania cell is a Leishmania mexicana cell. In certain embodiments, the Leishmania cell is a Leishmania pifanoi cell. In certain embodiments, the Leishmania cell is part of the Leishmania tropica species complex. In certain embodiments, the Leishmania cell is a Leishmania tropica cell.

[0107] In certain embodiments, other host cells may be genetically engineered using the method described herein. In certain embodiments, the host cell belongs to the bodonidae family of kinetoplasts. In a specific embodiment, the host cell is a Bodo saltans cell. In certain embodiments, the host cell belongs to the ichthyobodonidae family of kinetoplasts. In certain embodiments, the host cell belongs to the trypanosomatidae family of kinetoplasts. In certain embodiments, the host cell belongs to the blastocrithidia family of trypanosomatidae. In certain embodiments, the host cell belongs to the blechomonas family of trypanosomatidae. In certain embodiments, the host cell belongs to the herpetomonas family of trypanosomatidae. In certain embodiments, the host cell belongs to the jaenimonas family of trypanosomatidae. In certain embodiments, the host cell belongs to the lafontella family of trypanosomatidae. In certain embodiments, the host cell belongs to the leishmaniinae family of trypanosomatidae. In certain embodiments, the host cell belongs to the novymonas family of trypanosomatidae. In certain embodiments, the host cell belongs to the paratrypanosoma family of trypanosomatidae. In certain embodiments, the host cell belongs to the phytomonas family of trypanosomatidae. In certain embodiments, the host cell belongs to the sergeia family of trypanosomatidae. In certain embodiments, the host cell belongs to the strigomonadinae family of trypanosomatidae. In certain embodiments, the host cell belongs to the trypanosoma family of trypanosomatidae. In certain embodiments, the host cell belongs to the wallacemonas family of trypanosomatidae. In certain embodiments, the host cell belongs to the blastocrithidia family of trypanosomatidae.

### 5.3 Uses of the Leishmania Cell as Expression Systems

[0108] In certain embodiments, a Leishmania cell (as described in Section 5.2) may be used as an expression system for making of a polypeptide. In certain embodiments, the polypeptide may be a heterologous, non-Leishmania protein, such as a therapeutic protein (e.g., an antibody).

### 5.3.1 Compositions Comprising Host Cells

[0109] In one aspect, provided herein are compositions comprising the host cells described herein, for example, compositions comprising the Leishmania cells as described in Section 5.2. Such compositions can be used in methods for generating a target polypeptide as described in Section 5.4. In certain embodiments, the compositions comprising host cells can be cultured under conditions suitable for the production of polypeptides. Subsequently, the polypeptides can be isolated from said compositions comprising host cells using methods known in the art.

[0110] The compositions comprising the host cells provided herein can comprise additional components suitable for maintenance and survival of the host cells described herein, and can additionally comprise additional components required or beneficial to the production of polypeptides by the host cells, e.g., inducers for inducible promoters, such as arabinose, IPTG, tetracycline, and doxycycline.

[0111] In certain embodiments, provided herein are kits comprising one or more containers and instructions for use, wherein said one or more containers comprise the Leishmania cell described herein.

### 5.3.2 Methods of Target Polypeptide Production

[0112] In one aspect, provided herein are methods of making a target polypeptide as described in Section 5.4. In one embodiment, provided herein is a method of producing a target polypeptide as described in Section 5.4 in vivo, using a host cell described herein. In a specific embodiment, provided herein is a method for producing a target polypeptide, said method comprising (i) culturing a host cell provided herein under conditions suitable for polypeptide production and (ii) isolating said target polypeptide. In a specific embodiment, the host cell comprises (a) a recombinant nucleic acid encoding a target polypeptide; and (b) a recombinant nucleic acid encoding one or more heterologous glycosyltransferases. In certain embodiments, the heterologous glycosyltransferase is an N-acetyl glucosamine transferase; or a heterologous galactosyltransferase; or a heterologous sialyltransferase. In certain embodiments, the host cell is a Leishmania cell.

[0113] In one aspect, provided herein are methods of making a polypeptide as described in Section 5.4 comprising (a) culturing the Leishmania cell described herein in Section 5.2 under suitable conditions for polypeptide production; and (b) isolating the polypeptide. In certain embodiments, the method further comprises introducing a nucleotide sequence encoding the polypeptide.

[0114] In certain embodiments, the target polypeptide produced by the host cells provided is a therapeutic polypeptide, i.e., a polypeptide used in the treatment of a disease or disorder. For example, the target polypeptide produced by the host cells provided herein can be an enzyme, a cytokine, or an antibody. A list of non-limiting exemplary target polypeptides is provided in Section 5.4.

### 5.4 Target Polypeptide

[0115] In one aspect, provided herein are polypeptides produced by the method as described in Section 5.3. In certain embodiments, the target polypeptide produced by the Leishmania cells provided is a therapeutic polypeptide, i.e., a polypeptide used in the treatment of a disease or disorder. For example, the target polypeptide produced by the host cells provided herein can be an enzyme, a cytokine, or an antibody. In certain embodiments, the target the polypeptide is selected from the group consisting of adalimumab, rituximab and erythropoietin (EPO).

[0116] Any polypeptide (or peptide/polypeptide corresponding to the polypeptide) known in the art can be used as a target polypeptide in accordance with the methods described herein. One of skill in the art will readily appreciate that the nucleic acid sequence of a known polypeptide, as well as a newly identified polypeptide, can easily be deduced using methods known in the art, and thus it would be well within the capacity of one of skill in the art to introduce a nucleic acid that encodes any polypeptide of interest into a host cell provided herein (e.g., via an expression vector, e.g., a plasmid, e.g., a site specific integration by homologous recombination).

[0117] In certain embodiments, the target polypeptide is glycosylated, e.g., sialylated. One of skill in the art will further recognize that the target polypeptides may be glycosylated using the methods described herein, e.g., either in vivo using a host cell provided herein or in vitro, possess therapeutic benefit (e.g., due to improved pharmacokinetics) and thus can be used in the treatment of subjects having diseases/disorders that will benefit from treatment with the glycosylated (e.g., polysialylated) target polypeptides.

[0118] In certain embodiments, the target polypeptide comprises the amino acid sequence of human Interferon-α (INF-α), Interferon-β (INF-β), Interferon-γ (INF-γ), Interleukin-2 (IL2), Chimeric diphteria toxin-IL-2 (Denileukin diftitox), Interleukin-1 (IL1), IL1B, IL3, IL4, IL11, IL21, IL22, IL1 receptor antagonist (anakinra), Tumor necrosis factor alpha (TNF-α), Insulin, Pramlintide, Growth hormone (GH), Insulin-like growth factor (IGF1), Human parathyroid hormone, Calcitonin, Glucagon-like peptide-1 agonist (GLP-1), Glucagon, Growth hormone-releasing hormone (GHRH), Secretin, Thyroid stimulating hormone (TSH), Human bone morphogenic polypeptide 2 (hBMP2), Human bone morphogenic proetin 7 (hBMP7), Gonadotropin releasing hormone (GnRH), Keratinocyte growth factor (KGF), Platelet-derived growth factor (PDGF), Fibroblast growth factor 7 (FGF7), Fibroblast growth factor 20 (FGF20), Fibroblast growth factor 21 (FGF21), Epidermal growth factor (EGF), Vascular endothelial growth factor (VEGF), Neurotrophin-3, Human follicle-stimulating hormone (FSH), Human chorionic gonadotropin (HCG), Lutropin-α, Erythropoietin, Granulocyte colony-stimulating factor (G-CSF), Granulocyte-macrophage colony-stimulating factor (GM-CSF), the extracellular domain of CTLA4 (e.g., an FC-fusion), or the extracellular domain of TNF receptor (e.g., an FC-fusion). In a specific embodiment, the target polypeptide used in accordance with the methods and host cells described herein is an enzyme or an inhibitor. Exemplary enzymes and inhibitors that can be used as a target polypeptide include, without limitation, Factor VII, Factor VIII, Factor IX, Factor X, Factor XIII, Factor VIIa, Antithrombin III (AT-III), Polypeptide C, Tissue plasminogen activator (tPA) and tPA variants, Urokinase, Hirudin, Streptokinase, Glucocerebrosidase, Alglucosidase-α, Laronidase (α-L-iduronidase), Idursulphase (Iduronate-2-sulphatase), Galsulphase, Agalsidase-β (human α-galactosidase A), Botulinum toxin, Collagenase, Human DNAse-I, Hyaluronidase, Papain, L-Asparaginase, Uricase (Urate oxidase), glutamate carboxypeptidase (glucarpidase), α1 Protease inhibitor (α1 antitrypsin), Lactase, Pancreatic enzymes (lipase, amylase, protease), and Adenosine deaminase.

[0119] In a specific embodiment, the target polypeptide used in accordance with the methods and host cells described herein is a cytokine. Exemplary cytokines that can be used as a target polypeptide include, without limitation, Interferon-α (INF-α), Interferon-β (INF-β), Interferon-γ (INF-γ), Interleukin-2 (IL2), Chimeric diphteria toxin-IL-2 (Denileukin diftitox), Interleukin-1 (IL1), IL1B, IL3, IL4, IL11, IL21, IL22, IL1 receptor antagonist (anakinra), and Tumor necrosis factor alpha (TNF-α).

[0120] In a specific embodiment, the target polypeptide used in accordance with the methods and host cells described herein is a hormone or growth factor. Exemplary hormones and growth factors that can be used as a target polypeptide include, without limitation, Insulin, Pramlintide, Growth hormone (GH), Insulin-like growth factor (IGF1), Human parathyroid hormone, Calcitonin, Glucagon-like peptide-1 agonist (GLP-1), Glucagon, Growth hormone-releasing hormone (GHRH), Secretin, Thyroid stimulating hormone (TSH), Human bone morphogenic polypeptide 2 (hBMP2), Human bone morphogenic proetin 7 (hBMP7), Gonadotropin releasing hormone (GnRH), Keratinocyte growth factor (KGF), Platelet-derived growth factor (PDGF), Fibroblast growth factor 7 (FGF7), Fibroblast growth factor 20 (FGF20), Fibroblast growth factor 21 (FGF21), Epidermal growth factor (EGF), Vascular endothelial growth factor (VEGF), Neurotrophin-3, Human follicle-stimulating hormone (FSH), Human chorionic gonadotropin (HCG), Lutropin-α, Erythropoietin, Granulocyte colony-stimulating factor (G-CSF), and Granulocyte-macrophage colony-stimulating factor (GM-CSF).

[0121] In a specific embodiment, the target polypeptide used in accordance with the methods and host cells described herein is a receptor. Exemplary receptors that can be used as a target polypeptide include, without limitation, the extracellular domain of human CTLA4 (e.g., fused to an Fc) and the soluble TNF receptor (e.g., fused to an Fc).

[0122] In other embodiments, the target polypeptide is a therapeutic polypeptide. In other embodiments, the target polypeptide is an approved biologic drug. In another embodiment, the therapeutic polypeptide comprises the amino acid sequence of Abatacept (e.g., Orencia), Aflibercept (e.g., Eylea), Agalsidase beta (e.g., Fabrazyme), Albiglutide (e.g., Eperzan), Aldesleukin (e.g., Proleukin), Alefacept (e.g., Amevive), Alglucerase (e.g., Ceredase), Alglucosidase alfa (e.g., LUMIZYME), Aliskiren (e.g., Tekturna), Alpha-1-polypeptidease inhibitor (e.g., Aralast), Alteplase (e.g., Activase), Anakinra (e.g., Kineret), Anistreplase (e.g., Eminase), Anthrax immune globulin human (e.g., ANTHRASIL), Antihemophilic Factor (e.g., Advate), Anti-inhibitor coagulant complex (e.g., Feiba Nf), Antithrombin Alfa, Antithrombin III human, Antithymocyte globulin (e.g., Antithymocyte globulin), Anti-thymocyte Globulin (Equine) (e.g., ATGAM), Anti-thymocyte Globulin (Rabbit) (e.g., ATG-Fresenius), Aprotinin (e.g., Trasylol), Asfotase Alfa, Asparaginase (e.g., Elspar), Asparaginase Erwinia chrysanthemi (e.g., Erwinaze), Becaplermin (e.g., REGRANEX), Belatacept (e.g., Nulojix), Beractant, Bivalirudin (e.g., Angiomax), Botulinum Toxin Type A (e.g., BOTOXE), Botulinum Toxin Type B (e.g., Myobloc), Brentuximab vedotin (e.g., Adcetris), Buserelin (e.g., Suprecur), Cl Esterase Inhibitor (Human), Cl Esterase Inhibitor (Recombinant) (e.g., Ruconest), Certolizumab pegol (e.g., Cimzia), Choriogonadotropin alfa (e.g., Choriogonadotropin alfa), Chorionic Gonadotropin (Human) (e.g., Ovidrel), Chorionic Gonadotropin (Recombinant) (e.g., Ovitrelle), Coagulation factor ix (e.g., Alprolix), Coagulation factor VIIa (e.g., NovoSeven), Coagulation factor X human (e.g., Coagadex), Coagulation Factor XIII A-Subunit (Recombinant), Collagenase (e.g., Cordase), Conestat alfa, Corticotropin (e.g., H.P. Acthar), Cosyntropin (e.g., Cortrosyn), Darbepoetin alfa (e.g., Aranesp), Defibrotide (e.g., Noravid), Denileukin diftitox (e.g., Ontak), Desirudin, Digoxin Immune Fab (Ovine) (e.g., DIGIBIND), Dornase alfa (e.g., Pulmozyme), Drotrecogin alfa (e.g., Xigris), Dulaglutide, Efmoroctocog alfa (e.g., ELOCTA), Elosulfase alfa, Enfuvirtide (e.g., FUZEON), Epoetin alfa (e.g., Binocrit), Epoetin zeta (e.g., Retacrit), Eptifibatide (e.g., INTEGRILIN), Etanercept (e.g., Enbrel), Exenatide (e.g., Byetta), Factor IX Complex (Human) (e.g., AlphaNine), Fibrinolysin aka plasmin (e.g., Elase), Filgrastim (e.g., N.A.), Filgrastim-sndz, Follitropin alfa (e.g., Gonal-F), Follitropin beta (e.g., Follistim AQ), Galsulfase (e.g., Naglazyme), Gastric intrinsic factor, Gemtuzumab ozogamicin (e.g., Mylotarg), Glatiramer acetate (e.g., Copaxone), Glucagon recombinant (e.g., GlucaGen), Glucarpidase (e.g., Voraxaze), Gramicidin D (e.g., Neosporin), Hepatitis B immune globulin, Human calcitonin, Human Clostridium tetani toxoid immune globulin, Human rabies virus immune globulin (e.g., Hyperab Rabies Immune Globulin Human), Human Rho(D) immune globulin (e.g., Hyp Rho D Inj 16.5%), Human Serum Albumin (e.g., Albuminar), Human Varicella-Zoster Immune Globulin (e.g., Varizig), Hyaluronidase (e.g., HYLENEX), Hyaluronidase (Human Recombinant), Ibritumomab tiuxetan (e.g., Zevalin), Idursulfase (e.g., Elaprase), Imiglucerase (e.g., Cerezyme), Immune Globulin Human, Insulin aspart (e.g., NovoLog), Insulin Beef, Insulin Degludec (e.g., Tresiba), Insulin detemir (e.g., LEVEMIR), Insulin Glargine (e.g., Lantus), Insulin glulisine (e.g., APIDRA), Insulin Lispro (e.g., Humalog), Insulin Pork (e.g., Iletin II), Insulin Regular (e.g., Humulin R), Insulin, porcine (e.g., vetsulin), Insulin, isophane (e.g., Novolin N), Interferon Alfa-2a, Recombinant (e.g., Roferon A), Interferon alfa-2b (e.g., INTRON A), Interferon alfacon-1 (e.g., INFERGEN), Interferon alfa-n1 (e.g., Wellferon), Interferon alfa-n3 (e.g., Alferon), Interferon beta-1a (e.g., Avonex), Interferon beta-1b (e.g., Betaseron), Interferon gamma-1b (e.g., Actimmune), Intravenous Immunoglobulin (e.g., Civacir), Laronidase (e.g., Aldurazyme), Lenograstim (e.g., Granocyte), Lepirudin (e.g., Refludan), Leuprolide (e.g., Eligard), Liraglutide (e.g., Saxenda), Lucinactant (e.g., Surfaxin), Lutropin alfa (e.g., Luveris), Mecasermin (e.g., N.A.), Menotropins (e.g., Menopur), Methoxy polyethylene glycol-epoetin beta (e.g., Mircera), Metreleptin (e.g., Myalept), Natural alpha interferon OR multiferon (e.g., Intron/Roferon-A), Nesiritide (e.g., NATRECOR), Ocriplasmin (e.g., Jetrea), Oprelvekin (e.g., Neumega), OspA lipopolypeptide (e.g., Lymerix), Oxytocin (e.g., Pitocin), Palifermin (e.g., Kepivance), Pancrelipase (e.g., Pancrecarb), Pegademase bovine (e.g., Adagen), Pegaspargase (e.g., Oncaspar), Pegfilgrastim (e.g., Neulasta), Peginterferon alfa-2a (e.g., Pegasys), Peginterferon alfa-2b (e.g., PEG-Intron), Peginterferon beta-1a (e.g., Plegridy), Pegloticase (e.g., (Krystexxa)), Pegvisomant (e.g., SOMAVERT), Poractant alfa (e.g., Curosurf), Pramlintide (e.g., Symlin), Preotact (e.g., PreotactE), Protamine sulfate (e.g., Protamine Sulfate Injection, USP), Polypeptide S human (e.g., Polypeptide S human), Prothrombin (e.g., Feiba Nf), Prothrombin complex (e.g., Cofact), Prothrombin complex concentrate (e.g., Kcentra), Rasburicase (e.g., Elitek), Reteplase (e.g., Retavase), Rilonacept (e.g., Arcalyst), Romiplostim (e.g., Nplate), Sacrosidase (e.g., Sucraid), Salmon Calcitonin (e.g., Calcimar), Sargramostim (e.g., Leucomax), Satumomab Pendetide (e.g., OncoScint), Sebelipase alfa (e.g., Kanuma), Secretin (e.g., SecreFlo), Sermorelin (e.g., Sermorelin acetate), Serum albumin (e.g., Albunex), Serum albumin iodonated (e.g., Megatope), Simoctocog Alfa (e.g., Nuwiq), Sipuleucel-T (e.g., Provenge), Somatotropin Recombinant (e.g., NutropinAQ), Somatropin recombinant (e.g., BioTropin), Streptokinase (e.g., Streptase), Susoctocog alfa (e.g., Obizur), Taliglucerase alfa (e.g., Elelyso), Teduglutide (e.g., Gattex), Tenecteplase (e.g., TNKase), Teriparatide (e.g., Forteo), Tesamorelin (e.g., Egrifta), Thrombomodulin Alfa (e.g., Recomodulin), Thymalfasin (e.g., Zadaxin), Thyroglobulin, Thyrotropin Alfa (e.g., Thyrogen), Tuberculin Purified Polypeptide Derivative (e.g., Aplisol), Turoctocog alfa (e.g., Zonovate), Urofollitropin (e.g., BRAVELLE), Urokinase (e.g., Kinlytic), Vasopressin (e.g., Pitressin), Velaglucerase alfa (e.g., Vpriv), Abciximab (e.g., ReoPro), Adalimumab (e.g., Humira), Alemtuzumab (e.g., CAMPATH), Alirocumab (e.g., Praluent), Arcitumomab (e.g., CEA-Scan), Atezolizumab (e.g., Tecentriq), Basiliximab (e.g., Simulect), Belimumab (e.g., Benlysta), Bevacizumab (e.g., Avastin), Blinatumomab (e.g., Blincyto), Brodalumab (e.g., Siliq), Canakinumab (e.g., ILARISE), Canakinumab (e.g., Ilaris), Capromab (e.g., ProstaScint), Cetuximab (e.g., Erbitux), Daclizumab (e.g., Zenapax), Daratumumab (e.g., DARZALEX), Denosumab (e.g., Xgeva), Dinutuximab (e.g., unituxin), Eculizumab (e.g., Soliris), Efalizumab (e.g., RAPTIVA), Elotuzumab (e.g., EMPLICITI), Evolocumab (e.g., Repatha), Golimumab (e.g., Simponi Injection), Ibritumomab (e.g., Zevalin), Idarucizumab (e.g., Praxbind), Infliximab (e.g., REMICADE), Ipilimumab (e.g., YERVOY), Ixekizumab (e.g., Taltz), Mepolizumab (e.g., Nucala), Muromonab (e.g., ORTHOCLONE OKT3), Natalizumab (e.g., Tysabri), Necitumumab (e.g., Portrazza), Nivolumab (e.g., Opdivo), Obiltoxaximab (e.g., Anthim), Obinutuzumab (e.g., Gazyva), Ofatumumab (e.g., Arzerra), Omalizumab (e.g., Xolair), Palivizumab (e.g., Synagis), Panitumumab (e.g., Vectibix), Pembrolizumab (e.g., Keytruda), Pertuzumab (e.g., Perjeta), Ramucirumab (e.g., Cyramza), Ranibizumab (e.g., Lucentis), Raxibacumab (e.g., RAXIBACUMAB), Rituximab (e.g., Rituxan), Secukinumab (e.g., Cosentyx), Siltuximab (e.g., Sylvant), Tocilizumab (e.g., ACTEMRA), Tositumomab (e.g., Bexxar), Trastuzumab (e.g., Herceptin), Ustekinumab (e.g., Stelara), or Vedolizumab (e.g., Entyvio).

[0123] In other embodiments, the target polypeptide is an antibody. In further embodiments, the antibody has the amino acid sequence of adalimumab (Humira); Remicade (Infliximab); ReoPro (Abciximab); Rituxan (Rituximab); Simulect (Basiliximab); Synagis (Palivizumab); Herceptin (Trastuzumab); Mylotarg (Gemtuzumab ozogamicin); Campath (Alemtuzumab); Zevalin (Ibritumomab tiuxetan); Xolair (Omalizumab); Bexxar (Tositumomab-I-131); Erbitux (Cetuximab); Avastin (Bevacizumab); Tysabri (Natalizumab); Actemra (Tocilizumab); Vectibix (Panitumumab); Lucentis (Ranibizumab); Soliris (Eculizumab); Cimzia (Certolizumab pegol); Simponi (Golimumab); Ilaris (Canakinumab); Stelara (Ustekinumab); Arzerra (Ofatumumab); Prolia (Denosumab); Numax (Motavizumab); ABThrax (Raxibacumab); Benlysta (Belimumab); Yervoy (Ipilimumab); Adcetris (Brentuximab Vedotin); Perjeta (Pertuzumab); Kadcyla (Ado-trastuzumab emtansine); or Gazyva (Obinutuzumab).

[0124] In other embodiments, the antibody is a full length antibody, an Fab, an F(ab′)2, an Scfv, or a sdAb. In other embodiments, the target polypeptide comprises the amino acid sequence of an enzyme or an inhibitor thereof. In another embodiment, the target polypeptide comprises the amino acid sequence of Factor VII, Factor VIII, Factor IX, Factor X, Factor XIII, Factor VIIa, Antithrombin III (AT-III), Polypeptide C, Tissue plasminogen activator (tPA) and tPA variants, Urokinase, Hirudin, Streptokinase, Glucocerebrosidase, Alglucosidase-α, Laronidase (α-L-iduronidase), Idursulphase (Iduronate-2-sulphatase), Galsulphase, Agalsidase-β (human α-galactosidase A), Botulinum toxin, Collagenase, Human DNAse-I, Hyaluronidase, Papain, L-Asparaginase, Uricase (Urate oxidase), glutamate carboxypeptidase (glucarpidase), al Protease inhibitor (α1 antitrypsin), Lactase, Pancreatic enzymes (lipase, amylase, protease), and Adenosine deaminase.

[0125] In a specific embodiment, the target polypeptide used in accordance with the methods and host cells described herein is a receptor. Exemplary receptors that can be used as a target polypeptide include, without limitation, the extracellular domain of human CTLA4 (e.g., fused to an Fc) and the soluble TNF receptor (e.g., fused to an Fc).

[0126] In another embodiment, the target polypeptide is secreted into the culture media. In certain embodiments, the target polypeptide is purified from the culture media. In another embodiment, the target polypeptide is purified from the culture media via affinity purification or ion exchange chromatography. In another embodiment, the target polypeptide contains an Fc domain and is affinity purified from the culture media via polypeptide-A. In another embodiment, the target polypeptide contains an affinity tag and is affinity purified.

[0127] In certain embodiments, the target polypeptide used in accordance with the methods and host cells described herein can be a full length polypeptide, a truncation, a polypeptide domain, a region, a motif or a peptide thereof.

[0128] In certain embodiments, the target polypeptide is an Fc-fusion polypeptide.

[0129] In certain embodiments, the target polypeptide is a biologic comprising an Fc domain of an IgG.

[0130] In certain embodiment, the target polypeptide could be modified. In another embodiment, the target polypeptide has been engineered to comprise a signal sequence from Leishmania. In other embodiments, the signal sequence is processed and removed from the target polypeptide. In another embodiment, the target polypeptide has been engineered to comprise one or more tag(s). In other embodiments, the tag is processed and removed from the target polypeptide.

### 5.4.1 Composition and/or Formulation Comprising the Polypeptide

[0131] In another aspect, provided herein are compositions (e.g., pharmaceutical compositions) comprising one or more of the target polypeptides described herein. The compositions described herein are useful in the treatment and/or prevention of diseases/disorders in subjects (e.g., human subjects) (see Section 5.4.2).

[0132] In certain embodiments, in addition to comprising a target polypeptide described herein, the compositions (e.g., pharmaceutical compositions) described herein comprise a pharmaceutically acceptable carrier. As used herein, the term “pharmaceutically acceptable” means approved by a regulatory agency of the Federal or a state government or listed in the U.S. Pharmacopeia or other generally recognized pharmacopeiae for use in animals, and more particularly in humans. The term “carrier,” as used herein in the context of a pharmaceutically acceptable carrier, refers to a diluent, adjuvant, excipient, or vehicle with which the pharmaceutical composition is administered. Saline solutions and aqueous dextrose and glycerol solutions can also be employed as liquid carriers, particularly for injectable solutions. Suitable excipients include starch, glucose, lactose, sucrose, gelatin, malt, rice, flour, chalk, silica gel, sodium stearate, glycerol monostearate, talc, sodium chloride, dried skim milk, glycerol, propylene, glycol, water, ethanol and the like. Examples of suitable pharmaceutical carriers are described in “Remington's Pharmaceutical Sciences” by E. W. Martin.

[0133] In certain embodiments, the compositions described herein are formulated to be suitable for the intended route of administration to a subject. For example, the compositions described herein may be formulated to be suitable for subcutaneous, parenteral, oral, intradermal, transdermal, colorectal, intraperitoneal, and rectal administration. In a specific embodiment, the pharmaceutical composition may be formulated for intravenous, oral, intraperitoneal, intranasal, intratracheal, subcutaneous, intramuscular, topical, intradermal, transdermal or pulmonary administration.

[0134] In certain embodiments, the compositions described herein additionally comprise one or more buffers, e.g., phosphate buffer and sucrose phosphate glutamate buffer. In other embodiments, the compositions described herein do not comprise buffers.

[0135] In certain embodiments, the compositions described herein additionally comprise one or more salts, e.g., sodium chloride, calcium chloride, sodium phosphate, monosodium glutamate, and aluminum salts (e.g., aluminum hydroxide, aluminum phosphate, alum (potassium aluminum sulfate), or a mixture of such aluminum salts). In other embodiments, the compositions described herein do not comprise salts.

[0136] The compositions described herein can be included in a kit, container, pack, or dispenser together with instructions for administration.

[0137] The compositions described herein can be stored before use, e.g., the compositions can be stored frozen (e.g., at about −20° C. or at about −70° C.); stored in refrigerated conditions (e.g., at about 4° C.); or stored at room temperature.

### 5.4.2 Prophylactic and Therapeutic Uses

[0138] In one aspect, provided herein are methods of preventing or treating a disease or disorder in a subject comprising administering to the subject a target polypeptide described herein or a composition thereof. Further provided herein are methods of preventing a disease or disorder in a subject comprising administering to the subject a target polypeptide described herein or a composition thereof.

[0139] In one aspect, provided herein are methods of treating a disease or disorder in a subject comprising administering to the subject a target polypeptide described herein or a composition thereof. In another aspect, provided herein are methods of preventing a disease or disorder in a subject comprising administering to the subject a target polypeptide described herein or a composition thereof. In a specific embodiment, provided herein is a method for treating or preventing a disease or disorder in a subject comprising administering to the subject a polysialylated target polypeptide produced according to the methods described herein.

[0140] In certain embodiments, the disease or disorder may be caused by the presence of a defective version of a target polypeptide in a subject, the absence of a target polypeptide in a subject, diminished expression of a target polypeptide in a subject can be treated or prevented using the target polypeptides produced using the methods described herein. In certain embodiments, the diseases or disorder may be mediated by a receptor that is bound by a target polypeptide produced using the methods described herein, or mediated by a ligand that is bound by a target polypeptide produced using the methods described herein (e.g., where the target polypeptide is a receptor for the ligand).

[0141] In certain embodiments, the methods of preventing or treating a disease or disorder in a subject comprise administering to the subject an effective amount of a target polypeptide described herein or a composition thereof. In certain embodiments, the effective amount is the amount of a therapy which has a prophylactic and/or therapeutic effect(s). In certain embodiments, an “effective amount” refers to the amount of a therapy which is sufficient to achieve one, two, three, four, or more of the following effects: (i) reduce or ameliorate the severity of a disease/disorder or symptom associated therewith; (ii) reduce the duration of a disease/disorder or symptom associated therewith; (iii) prevent the progression of a disease/disorder or symptom associated therewith; (iv) cause regression of a disease/disorder or symptom associated therewith; (v) prevent the development or onset of a disease/disorder, or symptom associated therewith; (vi) prevent the recurrence of a disease/disorder or symptom associated therewith; (vii) reduce organ failure associated with a disease/disorder; (viii) reduce hospitalization of a subject having a disease/disorder; (ix) reduce hospitalization length of a subject having a disease/disorder; (x) increase the survival of a subject with a disease/disorder; (xi) eliminate a disease/disorder in a subject; and/or (xii) enhance or improve the prophylactic or therapeutic effect(s) of another therapy.

### 5.5 Assay

### 5.5.1 Strains, Growth and Genetic Methods

[0142] Provided herein are methods for culturing host cells.

[0143] Host cells are cultured using any of the standard culturing techniques known in the art. For example, cells are routinely grown in rich media like Brain Heart Infusion, Trypticase Soy Broth or Yeast Extract, all containing 5 μg/ml Hemin. Additionally, incubation is done at 26° C. in the dark as static or shaking cultures for 2-3d. In some embodiments, cultures of recombinant cell lines contain the appropriate selective agents.

[0144] A non-limiting list of selective agents is provided in Table 1.

TABLE 1
Selective agents used during transfection (50%
concentration for preselection and
100% concentration for main selection) and standard
culturing of L. tarentolae. Double amounts of the selective
agents could be used if higher selection pressure was intended.

| | Resistance | Concentration (100%) | Concentration |
|---|---|---|---|
| | conferring | main selection/standard | (50%) |
| Selective agent | gene | culturing | preselection |
| Nourseothricin | sat | 50 μg/ml | 25 μg/ml |
| Geneticin | neo | 50 μg/ml | 25 μg/ml |
| Paromomycin | neo | 300 μg/ml | 150 μg/ml |
| Zeocin | ble | 150 μg/ml | 75 μg/ml |
| Hygromycin | hyg | 50 μg/ml | 25 μg/ml |
| Blasticidin | bsd | 5 μg/ml | 2.5 μg/ml |
| Puromycin | pac | 5 μg/ml | 2.5 μg/ml |

### 5.5.2 Plasmids

[0145] Plasmids were derived from a pUC57 vector backbone for E. coli propagation and contained an ampicillin or kanamycin section marker. The expression cassettes are flanked by restriction sites suitable for excision. The composition of the cassettes depends on the intended use and is described in the respective methods and examples. The genes of interest are included as ORFs that were codon usage optimized for L. tarentolae by backtranslation of the protein sequences to nucleotide sequences using a custom Python3 script that stochastically selects codons based on the L. tarentolae codon usage frequency while excluding rare codons (frequency <10%). The codon usage has been calculated using cusp (Rice, et al. (2000) Trends in genetics: TIG 16 (6), pp. 276-277) on all annotated L. tarentolae nucleotide coding sequences. Optimized sequences were manually curated for avoidance of restriction sites and deletion of repeats or homopolymer stretches.

[0146] To select new intergenic regions for the generation of artificial polycistrons, the genomes of L. mexicana, L. donovani, and L. infantum were searched for homologs to L. major genes that were shown to have high relative expression transcript levels (Rastrojo, et al. (2013) BMC Genomics 14, p. 223) and the associated 3′ intergenic regions (Murray, et al. (2007) Molecular and Biochemical Parasitology 153 (2), pp. 125-132) were further filtered using blastn (Camacho, et al. (2009) BMC Bioinformatics 10, p. 421) to exclude those that have more than 80% identity to each other (using cd-hit (Li, et al. (2006) Bioinformatics 22 (13), pp. 1658-1659)) or identical stretches of more than 30 bp to the L. tarentolae genome.

[0147] For long integration constructs, the constructs were split into several pieces of usually less than 2500 bp that contained regions for homologous recombination with either other fragments (usually 200 bp) or the chromosomal integration locus (usually 500 bp) in their extremities to allow assembly by the Leishmania tarentolae homologous recombination system.

[0148] The plasmids were generated and sequenced by a gene synthesis provider. Plasmids and descriptions are found in the sequence listings.

[0149] (i) Transfection Method

[0150] (A) Preparation of DNA

[0151] Restriction digest (12 μg DNA in total volume of 240 μL) was performed using standard restriction enzymes (ThermoFisher, preferably FastDigest) according to the manufacturer's instructions. The restriction digest was performed until completion or o/n at 30° C. and purified DNA by EtOH precipitation (2 volume 100% ice cold EtOH was added to 1 volume digested DNA, incubated 30 min on ice, centrifuged for 30 min 17′500×g at 4° C. Pellet was washed with 70% EtOH and subsequently dried for maximum 15 min before resuspension in ddH₂O. For optimized removal of circularized plasmid, 1 or 2 restriction enzymes with recognition sites in the vector backbones were chosen and a digest was done for 1 h at 37° C. and purified by EtOH as described above. The digest was analyzed by agarose gel electrophoresis in 0.7-2% agarose gels (TAE buffer). Optionally, gel extraction was performed with the NucleoSpin® Gel and PCR Clean-up kit (Macherey&Nagel) according to manufacturer's instructions to remove undigested plasmid from the preparation.

[0152] (B) DNA Preparation for Transfection

[0153] The linear DNA fragments for integration are mixed for transfection in the needed combinations at 1 μg per fragment. The volume of the mix was reduced to approximately 2 μl per transfection in a vacuum concentrator at 30° C. For episomal transfection of plasmids, 0.1-1 of plasmid DNA were directly used for transfection.

[0154] (C) Transfection with Nucleofector

[0155] One day before transfection, a densely grown culture of the parental strain was diluted 1:10 into fresh media (Brain Heart Infusion plus Hemin, “BHIH”; or Yeast Extract plus Hemin, “YEH”) containing all antibiotics for which selection markers were previously integrated and cultured overnight at 26° C.

[0156] Transfection was performed using the 4DNucleofector™_Core_X with the P3 Primary Cell 4D-Nucleofector™ X Kit (Lonza). For this, DNA as prepared above was mixed with 16.4 μl P3 Primary Cell solution and 3.6 μl Supplement Solution. The equivalent culture volume of 10⁷ cells (OD should be around 0.3-1.0/ml, cell shape round to drop-like) was pelleted by centrifugation at 1800 g for 5 min and the supernatant was removed. The cell pellet was resuspended in the DNA mix and transfected using a 16-well electroporation strip with pulse FI-158 (in some examples alternative pulses FP167, CM150, EO115, DN100, FP158, FB158 were used). As negative control, an additional culture was transfected with ddH₂O only.

[0157] 80 μl of fresh media (BHIH or YEH plus parental cell line selection markers) was added to each well and 2×45 μl of the mix were transferred to individual wells of a 96 well culture plate that were prefilled with 200 μl of fresh medium. After incubation for 24 h at 26° C. in the dark (recovery), the new selection marker was added at 50% concentration (preselection; see table 2). After further incubation for 1-2 days, the selection marker was topped up to 100% (main selection, see table) and several dilutions between 1:2 and 1:10 were performed in 96 well format (final volume 250 μl). Cultures were further incubated at 26° C. in the dark for up to 7 days. If no growth was observed, the culture medium was replaced (centrifugation at 1800 g, 10 min, RT) and cultures were again incubated for up to 7 days. This step was repeated if necessary. Growing cultures were expanded in to higher culture volumes by dilutions in the range of 1:5 and 1:20 before analysis.

[0158] (D) Transfection with Gene Pulser Xcell™ (Biorad)

[0159] Preparation of the Leishmania culture for transfection was done by a 1:10 dilution of a densely grown culture in BHIH or YEH the day before transfection, static at 26° C. The OD was measured at 600 nm with photometer in single-use cuvettes and ranged be between 0.4-1.0 (4-6×10*7 cells) for optimal efficiency. The cells should be in log-phase, which is indicated by a mixed population out of round and drop-like shaped cells. More round shaped cells were preferred. 10 ml culture was used for one transfection and one culture was always electroporated with ddH₂O as negative control for the respective selection marker. For transfection the culture was spun at 1 ‘800×g for 5 min, RT. The SN was removed and pellet resuspended in 5 ml transfection buffer (200 mM Hepes pH 7.0, 137 mM NaCl, 5 mM KCl, 0.7 mM Na2HPO4, 6 mM dextrose, anhydrous (glucose), sterile filtered 0.22 um). Cells were centrifuged again and the pellet was resuspended in 400 μl transfection buffer. 400 μl of cells were added to the DNA and transferred into the cuvettes and incubate on ice for 10 min. Electroporation was performed with a Gene Pulser Xcell™ (Biorad) using a low voltage protocol (μ exp. decay: 450 V, 450 μF, 5-6 ms, cuvette: d=2 mm) and immediately put on ice for exact 10 min. The whole content of cuvette was transferred into 10 ml BHIH or YEH without any selection marker and cells were grown at 26° C. in dark, aerated, static for 20-24 h. For the selection of a polyclonal cell line, half concentration of selection marker was added and cultures were incubated at 26° C. for 1-2 days and then passaged 1:10 in 10 ml BHIH or YEH with full concentration of selection marker. Cells were grown further at 26° C. in dark. If after 7 days cultures were turning into turbid culture, cells would be spun down at 1′800×g for 5 min at RT and pellet is resuspended in new BHIH or YEH media containing full selection marker concentration.

[0160] (ii) Clonal Selection

[0161] For clonal selection, cells were streaked on BHIH or YEH plates (containing 1.4% agar and the appropriate 100% selective agent) as soon as the liquid culture turned turbid. Plates were sealed with parafilm and incubated 7-10 days upside down in dark at 26° C. Single colonies (1-2 mm size) were transferred into 24-well plates containing 1 ml BHIH or YEH, sealed with parafilm and incubated in dark at 26° C. for around 7-10 days. 1 ml culture was then transferred from 24-well plate into 10 ml BHI or YEH in a flask and further grown statically as usual.

[0162] (iii) Extraction of Genomic DNA by Gravity Flow Method for Long Read Sequencing

[0163] Genomic DNA was extracted from 10 ml of dense Leishmania tarentolae culture (grown for 3 days; OD approx. 2) by using the Macherey Nagel NucleoBond CB 100 Kit #740508 (Nucleobond Buffer set IV #740604 with AXG 100 columns). For this, the cells were pelleted for 15 min at 1600 g and washed twice with 10 ml PBS. Next, the cell pellet was resuspended in 1 ml PBS and subjected to the extraction protocol according to manufacturer's instructions.

[0164] (iv) Nanopore Sequencing

[0165] Construction of strains St16834, St17311, St17212, St17180 were verified by long read Nanopore sequencing. Library preparation was performed according to the manufacturer's instructions (Oxford Nanopore Technologies, Oxford, UK). Nanopore sequencing was performed on a GridION X5 instrument (Oxford Nanopore Technologies) with real-time base calling enabled. Sequencing runs were terminated after 48 h. Raw reads were assembled using Canu hierarchical assembler (version 1.8) (Koren, et al. (2017) Genome research 27 (5), pp. 722-736). Assembled contigs were compared to the target in silico reference sequence using BLAST (Camacho, et al. (2009) BMC Bioinformatics 10, p. 421) and Artemis Comparison Tool (Carver, et al. (2005 Bioinformatics 21 (16), pp. 3422-3423).

[0166] (v) PacBio Sequencing

[0167] PacBio long read genome sequencing was performed on 2 PacBio SMRT cell (v2.1 chemistry) for St15448 and 1 PacBio sequel SMRT cell for St17527 with the library preparation according to the manufacturer's specification).

[0168] PacBio raw reads were assembled into long contigs using HGAP [https://github.com/PacificBiosciences/Bioinformatics-Training/wiki/HGAP-in-SIVIRT-Analysis] and error corrected using two rounds of Arrow [https://github.com/PacificBiosciences/GenomicConsensus].

[0169] (vi) Illumina Sequencing

[0170] Genomic DNA of St17527 was additionally sequenced on Illumina NextSeq (2×150 bp paired-end sequencing; TruSeq library preparation according to the manufacturer's specification). The resulting quality trimmed data consists of approximately 20M paired reads per strain. BWA-MEM (Li, Heng (2013) Aligning sequence reads, clone sequences and assembly contigs with BWA-MEM. Available online at http://arxiv.org/pdf/1303.3997v2) was used to align the reads to the reference sequence.

### 5.5.3 Expression Analysis

[0171] (i) Sample Preparation from Leishmania tarentolae

[0172] Cells were grown for 2-3 days at 26° C., static (e.g. in 3 ml in a 6-well plates). Whole cell extract (WCE) and cell free culture supernatants corresponding are analyzed by Western blot. For supernatant analysis, grown culture was centrifuged at 1800 g at RT for 5 min and cell free supernatant was transferred to a new tube and mixed with Laemmli dye under reducing or non-reducing conditions. Cell pellets for WCE were washed with 1×PBS, centrifuged again at 1800 g at RT for 5 min and frozen at −80° C. for minimally 30 min. After thawing it again at RT pellet was then resolved in Laemmli (reducing) buffer, boiled again at 95° C. for 10 min and vortexed intensively.

[0173] (ii) Expression Analysis by Western Blot

[0174] Samples were run on 4-12% Bis-Tris SDS PAGE, using a MOPS running buffer with 200 V for 60 min. Gels were blotted using an Iblot device for 7 min on PVDF membranes. Membranes were blocked for at least 30 min at RT in 10% milk. Primary antibodies (i.e. goat anti-Human IgG-HRP (A6029, Sigma) 1:2000 diluted, mouse anti-Human Kappa Light Chain (K4377, Sigma) 1:5000 diluted or rabbit anti S. pneumoniae serotype 1 polysaccharide (SSI, #16744) 1:100 diluted) were used diluted in 1% milk, 1×PBST for o/n incubation at 4° C. Afterwards, the blot was washed with 1×PBST three times for 5 min before detection with horse reddish peroxidase (HRP) coupled secondary antibodies (anti-mouse polyvalent-HRP (A0412, Sigma) 1:2000 diluted or anti-rabbit-HRP conjugate (Jackson ImmunoResearch #111-035-008) 1:2000 diluted) in 1% milk, lx PBST for 3 h rotating at 30° C., followed by three washes for 5 min in 1×PBST and one component 3,3′,5,5′-tetramethylbenzidine (TMB) substrate staining for colorimetric detection (TMBM-1000-01, Surmodics).

### 5.5.4 Small Scale Expression, Purification of Adalimumab

[0175] Host cells were routinely grown in 50 ml culture in BHIH or YEH for 48 h at 26° C. shaking at 140 rpm. Cultures were harvested and centrifuged for 10 min at 1800×g at RT. Media SN was filtered through 0.22 μm filter (Steriflip, SCGP00525) and EDTA (0.5 M pH8) was added to each load in a 1:100 dilution. Media SNs of each strain were subjected to 4 h incubation with 100 μl of proteinA resin (ProteinA-Sepharose 4B Fast Flow, Sigma Aldrich, P9424) per Falcon tube in batch while rotating at RT. After treatment with protein A resin, the samples were centrifuged at 500×g for 5 min, the FT was discarded and the resin was transferred to spin columns. Washes were performed with 3×5 CV using Buffer A (pH 7.2 20 mM Na₂HPO₄, 150 mM NaCl, pH was adjusted with HCl to 7.20) using 500 μl for 100 μl resin; with centrifugation at 1000×g, RT, 1 min between each step. Elution was performed with several CV of Buffer B (0.1 M acetic acid, 100 mM NaCl, pH was adjusted with 1 M NaOH to 3.20) using 100 μl for 100 μl resin, with centrifugation at 1000×g, RT, 1 min between each step (e.g. 3×1 CV and 1×0.5 CV). Elution fractions were pooled and immediately neutralized by adding 100 mM Tris-HCl (1 M pH8). Afterwards, the pooled elutions were buffer exchanged to PBS pH 6 using 2 ml 7K ZebaSpin desalting columns and optionally concentrated using Amicon 0.5 ml 30 K concentrators.

### 5.5.5 Analysis of N-Glycans Released from Purified Proteins and Cells Surfaces by HILIC-UPLC-MS

[0176] Enzymatic release of N-glycans from purified proteins was performed using Rapid PNGase F (New England Biolabs) as recommended by the supplier. 8 μl of sample (15 μg of protein) were mixed with 2 μl Rapid Buffer and 1 μl of Rapid PNGase F. The mixture was incubated at 50° C. for 10 min followed by 1 min at 90° C.

[0177] Enzymatic release of N-glycans from cell surfaces was performed using PNGase F (New England Biolabs). Cells (grown for 48 or 72 h at 26° C. shaking at 140 rpm) were harvested and washed with PBS by centrifugation for 10 min at 1800×g at RT.50 mg of cell pellet were re-suspended in Glyco Buffer 2 and incubated with 1 μl PNGase F for 1 h at 37° C. and 650 rpm. Cells were again pelleted by centrifugation and 75 μl of the supernatant was dried down in a SpeedVac concentrator. Glycans were resuspended in 10 μl of water. Following release, glycans were directly labeled with procainamide as described previously (Behrens, et al. (2018) Glycobiology 28 (11), pp. 825-831). Briefly, released glycans were mixed with 1 μl acetic acid, 8 μl of a procainamide stock solution (550 mg/ml in DMSO) and 12 μl of a sodium cyanoborohydride stock solution (200 mg/ml in H₂O). Samples were incubated for 60 min at 65° C. and cleaned up using LC-PROC-96 clean up plates (Ludger Ltd) according to the manufacturer's instructions.

[0178] Procainamide-labeled N-glycans were analyzed by hydrophilic interaction chromatography-ultra performance liquid chromatography-mass spectrometry (HILIC-UPLC-MS) using am Acquity UPLC System (Waters) with fluorescence detection coupled to a Synapt G2-Si mass spectrometer (Waters). Glycans were separated using an Acquity BEH Amide column (130 Å, 1.7 2.1 mM×150 mM; Waters) with 50 mM ammonium formate, pH 4.4 as solvent A and acetonitrile as solvent B. The separation was performed using a linear gradient of 72-55% solvent B at 0.5 ml/min for 40 min. Fluorescence was detected at an excitation wavelength of 310 nm and a detection wavelength of 370 nm. The Synapt G2-Si mass spectrometer fitted with a Zspray electrospray source was used for mass detection in positive resolution mode using the following parameters: Scan range: m/z 300-3500; scan time: 1 sec; capillary: 2.2 kV; source temperature: 120° C. and sampling cone: 75 V. MassLynx 4.2 (Waters) was used for data acquisition. Data processing and analysis was performed using Unifi 1.9.4.053 (Waters). Glucose units were assigned using a fifth-order polynomial distribution curve based on the retention times of a procainamide-labeled dextran ladder (Ludger Ltd). Glycan structures were assigned based on their m/z values and their retention times and matched against a previously constructed N-glycan library. For individual samples the UPLC was coupled to a Synapt HDMS mass spectrometer using comparable settings.

[0179] For a few samples, Waters RapiFluor labelling kit, mostly following the Waters Application Note: <<Quality control and Automation Friendly GlycoWorks RapiFluor-MS N-Glycan Sample Preparation>> that were analyzed using the same instrumentation as the procainamide labelled glycans (RF-MS).

### 5.5.6 DMB Labeling of Neu5Ac and CMP-Neu5Ac

[0180] A highly sensitive strategy to quantify the concentration of nucleotide-activated sialic acid by a combination of reduction and fluorescent labeling using the fluorophore 1, 2-diamino-4,5-methylenedioxybenzene (DMB) was applied. The labeling with DMB requires free keto as well as carboxyl groups of the sialic acid molecule. Reduction of the keto group prior to the labeling process precludes the labeling of non-activated sialic acids (Neu5Ac). Since the keto group is protected against reduction by the CMP-substitution, labeling of nucleotide-activated sialic acids is still feasible after reduction. Subsequent combination of the DMB-high-performance liquid chromatography (HPLC) applications allows identification of both total Neu5Ac and modified CMP-sialic acid and quantification in the femtomole range (Galuska, et al. (2010) Anal Chem 82 (11), pp. 4591-4598).

[0181] MeOH/Chloroform extraction procedure for L. tarentolae cell pellets was performed on 4 OD of each sample, which were harvested by centrifugation and washed 2× with 1×PBS and frozen. For extraction, pellets were thawed, resuspended in 480 μl MeOH, supplemented with 20 μl water and sonicated in a water bath at RT for 15 min. The samples were spun in a table-top centrifuge at 18000 g and 4° C. for 10 min. The SN was transferred into a glass vial, supplemented with 268 μl chloroform and vortexed. Next, 500 μl H₂O (MS grade) was added and the sample was vortexed again. The MeOH/chloroform/H₂O (1/0.54/1) mixture was spun at 2200 g and RT for 20 min to remove proteins, lipids and DNA in the CHCl3 phase. Approximately half (525 μl) of the upper MeOH/H₂O phase was collected and transferred into Eppendorf tubes, corresponding to extracted material from 2 OD pellet. The samples were dried in a speed-vac, resuspended in 16 μl H₂O and split into two samples of 8 μl that were separately subjected to DMB labeling with and without reduction. As control, Neu5Ac in H₂O was dried in a SpeedVac and dried material was diluted in H₂O, split into two for both labelling procedures. One set of samples was supplemented with 10 μl of ice cold 0.4 M sodium borate buffer pH 6.8 and 2 μl of freshly thawed 2 M borohydride in 0.5 M NaOH (final=0.2 M sodium borate buffer pH 8,8 containing 0.2 M borohydride) and incubated at RT for 2 h (reduced samples). The second set of samples was supplemented with 10 μl of ice cold 0.4 M sodium borate buffer pH 6.8 and 2 μl of 0.5 M NaOH (final=0.2 M sodium borate buffer pH 8,8) and incubated at RT for 2 h (non-reduced samples). Afterwards, samples were dried in a speedVac, resuspended in 3 μl H₂O and subjected to standard DMB labelling using the Takara labeling kit (#4400) according to manufacturer's instructions. Finally, samples were analyzed by RP-C18-LC in duplicates. Quantification was performed using a defined standard curve for which the standard solutions were subjected to incubation in sodium borate buffer (non-reducing) and DMB labeling analogous to the procedure described for non-reduced samples above.

### 6. EXAMPLES

### 6.1 Example 1

[0182] To analyze the capability of Leishmania tarentolae to assemble a chromosomal integration construct from multiple DNA fragments by homologous recombination, transfection of the same construct (for expression of a monoclonal antibody, Rituximab) was in parallel attempted by a 1-fragment and a 2-fragment version.

[0183] The 1-fragment version (pLMTB5026) contains the coding sequences for light chain, heavy chain and a selection marker (Nourseothricin, ntc) flanked and interspaced by intergenic regions. These intergenic regions are used as spacers (intergenic region, IR) in the construction of synthetic polycistrons, since they are central components of the native polycistronic gene clusters in Leishmania that ensure proper splicing of the pre-mRNA and furthermore are believed to influence gene expression by regulating transcript stability. In addition, the extremities of the DNA fragment contain (600-1000 bp) regions homologous to the L. tarentolae rDNA locus (ssu) in order to integrate the construct into the genome (FIG. 34 in International Publication No. WO2019/002512 A2, incorporated by reference in its entirety herein).

[0184] The 2-fragment version contains the same genetic elements, but distributed across two DNA fragments. Fragment P1 (pLMTB5024) contains the coding sequences for light and heavy chain as well as the intergenic regions upstream of these CDS. The 5′ end of the fragment contains the homologous recombination site for integration into the ssu locus. The last 250 bp of the heavy chain CDS (3′ end of P1 construct) are repeated in the first 250 bp of the second fragment (P2; pLMTB5025) in order to allow homologous recombination between the two fragments via their identical sequences. Furthermore, P2 comprises an intergenic region downstream of the heavy chain (CamIR), the selection maker (ntc) followed by another intergenic region (3′UTR=dhfr-ts) and the 3′ homologous recombination site for integration into the ssu locus (FIG. 1A).

[0185] The different constructs, either SwaI linearized pLMTB5026 or SwaI linearized pLMTB5024+pLMTB5025, were transfected (Biorad system) into L. tarentolae (St10569). For both versions, viable polyclones were obtained and Western blot analysis of the clones obtained by the 2-fragment version also showed significant monoclonal antibody expression upon detection with light or heavy chain specific antibodies (FIG. 1B). This demonstrates the feasibility of the formation of expression constructs from several DNA fragments.

### 6.2 Example 2

[0186] To obtain a cell line expressing four different glycosyltransferases for conversion of the endogenous Man3 to G2 N-glycans (two functionally redundant enzymes for addition of the first glycoengineering step, SfGnt1 and drMGAT1, as well as rnMGAT2 and hsB4GalT1 for further extension to N-glycan “G2”) (International Publication No. WO2019/002512 A2, incorporated by reference in its entirety herein), wild type L. tarentolae (St10569) were transfected with an expression construct formed by homologous recombination of ten DNA fragments. These DNA fragments were designed similar to the previously introduced constructs with intergenic regions interspersing the coding sequences in the assembled synthetic polycistron and a PolI promoter region that is derived from the well described ribosomal DNA locus and supports high-level expression of the counterclockwise-integrated construct. Usually, the aquaporin locus as most protein coding genes in Leishmania is transcribed by PolII, for which specific promoter regions are elusive. Homologous recombination in-between the fragments and between fragments and the aquaporin locus on the genome (AQP) was enabled by 200 bp and 500 bp homologous regions, respectively (FIG. 2, top). Furthermore, the overlaps were planned in a way that allows modular exchange of individual enzymes or intergenic regions by combination of linear fragments from different donor plasmids.

[0187] To improve the transfection efficiency for multi-fragment homologous recombinations a new transfection system (Nucleofector) was tested in parallel to the old one (BioRad).

[0188] Linear DNA fragments derived from plasmids (pLMTB6855, 6952, 6958, 6807, 6848, 6852, 6811, 6860, 6906, 6861) were transfected into wt L. tarentolae (St10569) by either transfection method 1 using the Biorad system or Transfection method 2 using the Nucleofector system. For both methods, viable polyclones were obtained suggesting the successful recombination of the split selection marker.

[0189] The resulting polyclones were analyzed for their engineered N-glycans by RF-MS on whole cell protein level, exemplified for St15257 in FIG. 2 and demonstrated successful glycoengineering up to G2 (16%), which implies that an expression construct covering at least 3 of the enzymes had been assembled by L. tarentolae. This demonstrated the general feasibility of integrating multi-fragment assemblies into L. tarentolae for glycoengineering. For both transfection methods, clones exhibiting similar properties were obtained, demonstrating that the transfection was feasible independent of the applied transfection method. Nevertheless, the clones from the Nucleofector transfection grew up slightly faster than the ones from the BioRad system, suggesting better cell viability after transfection and thus potentially better transfection efficiency.

### 6.3 Example 3

[0190] To obtain conversion of the endogenous Man3 to G2 N-glycans in a strain that was previously transfected with a Rituximab expression construct, St12427 was transfected with a second expression construct formed by homologous recombination of ten DNA fragments. The construct encodes for expression of four different glycosyltransferases, i.e. two functionally redundant enzymes for addition of the first GlcNAc, SfGnt1 and drMGAT1, as well as rnMGAT2 and hsB4GalT1 for further extension to G2.

[0191] DNA fragments derived from plasmids (pLMTB6950, 6956, 6808, 6849, 6852, 6811, 6816, 6873, 6855, 6861) were transfected into L. tarentolae St12427 by transfection method 2 using the Nucleofector system. Viable polyclones were obtained suggesting the successful recombination of the split selection marker.

[0192] The resulting polyclones were analyzed by RF-MS on whole cell protein level and demonstrated glycoengineering up to G2 (4%) in some strains (St15368), which implies that an expression construct covering at least 3 of the enzymes had been assembled by L. tarentolae. This corroborates the general feasibility of integrating multi-fragment assemblies into L. tarentolae for glycoengineering. Other clones however only showed conversion up to G0-N (e.g. St15448), which suggests an incomplete integration of the construct (FIG. 3A).

[0193] In order to assess the genetic composition in strain St15448, gDNA was prepared (Macherey&Nagel NucleoBond® CB100) and subjected to PacBio long read genome sequencing on 2 PacBio SMRT cell (v2.1 chemistry, library preparation according to the manufacturer's specification). Several of the long subreads demonstrated an incomplete integration of the construct that includes only the coding sequences for the glycosyltransferases drMGAT1 and SfGnt1, which both catalyze the addition of the first GlcNAc to Man3. Thus, the obtained sequencing data are in line with the observed phenotype of the N-glycan profile. The data furthermore support that the incomplete integration happened by correct integration of the 3′ end of the construct into the AQP locus on chromosome 31, while instead of 5′ end integration into AQP, the intergenic region PfrIR (native L. tarentolae ˜2 Kb) recombined with the endogenous Pfr expression locus on chromosome 29. By this, a chromosomal crossing over (FIG. 3B) was created. Besides this, also native chromosomes 29 and 31 were detected, most likely in diploid form (data representative cartoon shown in FIG. 3C).

[0194] These sequencing data indicate that the wrong homologous recombination was favored over the intended integration locus. This might have been facilitated by the fact that the Pfr intergenic region is long (˜2 Kb) and 100% identical to the native genetic locus and the fact that the AQP locus is very close the telomere of the chromosome.

[0195] Another example that corroborates the hypothesis that stretches of homology between the fragments should be avoided was identified in a construct where hsB4GalT1-Strep, hsMAGT1-3×HA and rnMGAT2-3×HA were transfected into L. tarentolae wild type background (St10569+pLMTB6946, 6951, 8080, 8081, 8082, 8083, 8085, 6924). In the resulting strain St16834 almost no activity of hsMGAT1 was detectable along with a complete absence of MGAT2 activity (78% M3, 11% G0-N, and 11% G1-N). Long read sequencing with the Nanopore technology revealed that two fragments carrying the rnMGAT2-3×HA had not been integrated into the genomic locus since two adjacent glycosyltransferases were both triple HA-tagged and the nucleotide sequence of the tag region was 100% identical. This demonstrates that a stretch of 93 bp is sufficient for homologous recombination (FIG. 4).

### 6.4 Example 4

[0196] The previous examples suggested that the use of homologous sequences between the different fragments for integration as well as between the fragments and the L. tarentolae genome can lead to unwanted homologous recombination. This on one hand necessitates the use of codon-diversified variants or homologs of glycosyltransferases when increasing the gene dosage for a specific N-glycan conversion step. On the other hand, this finding prohibits the repeated use of the previously successfully tested intergenic regions. Data about the exact signals for splicing and mRNA stability in L. tarentolae are not available and thus design of synthetic intergenic regions is currently not feasible. To overcome this limitation, a new set of DNA fragments was designed that use intergenic regions from other Leishmania species and various codon usage variants as wells as different homologues of the different glycosyltransferases.

[0197] Genes from L. mexicana, L. donovani, and L. infantum that are believed to be highly expressed have been identified by looking for homologs to L. major genes that were shown to have high relative expression transcript levels (Rastrojo, et al. (2013) BMC Genomics 14, p. 223). The 3′ untranslated region (UTR) of these genes are believed in turn to support high protein expression levels (Murray, et al. (2007) Molecular and Biochemical Parasitology 153 (2), pp. 125-132). To minimize the potential for unwanted homologous recombination, sequences with >80% identity to each other (using cd-hit (Li, et al. (2006) Bioinformatics 22 (13), pp. 1658-1659.) and more than 30 bp identical stretches to the L. tarentolae genome, using blastn (Camacho, et al. (2009) BMC Bioinformatics 10, p. 421), have been excluded.

[0198] Protein sequences were back-translated to nucleotide sequences using a custom Python3 script that stochastically selects codons based on the L. tarentolae codon usage frequency while excluding rare codons (frequency <10%). The codon usage has been calculated using cusp (Rice, et al. (2000) Trends in genetics: TIG 16 (6), pp. 276-277) on all annotated L. tarentolae nucleotide coding sequences.

[0199] Again, as in the previous multi-fragment homologous recombination constructs, 200 bp overlaps between the fragments and 500 bp homologous regions to the anticipated integration sites were included to allow assembly of the fragments in Leishmania. New integration loci were designed and either used in a “Tandem integration” approach (FIG. 5, bottom), in which the new construct is integrated between the 5′UTR and the coding sequence of a highly expressed or multi-copy gene such as alpha Tubulin (aTub). In this case, no additional promotor region (PolI) is included in the construct and thus the endogenous IR of the target locus will govern the PolII mediated transcription of the first coding sequence of the integration construct. Consequently, the integration construct needs to conclude with an intergenic region at its 3′ end, which spaces the last CDS of the construct and the endogenous gene of the target locus. Alternatively, new loci are used in a “disruptive integration” approach (FIG. 5, top) where the CDS of a target gene is exchanged for the integration construct. In order to profit from the high transcription efficiency of RNA PolI in Leishmania, this integration approach can be paired with use of the PolI promoter region from L. tarentolae and counterclockwise integration. The latter should avoid an imbalanced transcription of neighboring genes that are usually transcribed by PolII (FIG. 5).

[0200] In order to test the capability of the IRs from different species to support expression of the glycosyltransferases, a set of four different transfections was performed with the Nucleofector method. Herein, the glycosyltransferases, the selection marker as well as the integration locus (shown example targets GP63 locus) were kept constant and only the intergenic regions were varied. Each transfection construct combined four different IRs from the same species in order to identify whether compatibility is limited to specific species (L. major, L. donovani, L. infantum, L. mexicana). For St17212, these fragments were derived from pLMTB8234, 8235, 8250, 8295, 8297, 8301, 8302, 8303, 6933. For St17311, these fragments were derived from pLMTB 8234, 8235, 8250, 8306, 8307, 8310, 8311, 8312, 6933. For St17176 these fragments were derived from pLMTB 8250, 8334, 8234, 8335, 8235, 8336, 8328, 8330, 6933. For St17180, these fragments were derived from pLMTB 8250, 8322, 8234, 8323, 8235, 8324, 8316, 8318, 6933.

[0201] All transfections successfully produced viable clones that were grown in 50 ml shake flask cultures and subjected to N-glycan analysis of the surface protein fraction of L. tarentolae (St17212=LmIR, St17311=LdIR, St17176=LiIR, St17180=LmxIR; FIG. 6A). The N-glycan profiles demonstrated that all four transfections were mostly successful since in the variants containing IRs from L. major, L. donovani, L. mexicana conversion up to G2 and in the variant with L. infantum IRs at least G1-N was detected (FIG. 6A). This demonstrates that intergenic regions from all four Leishmania species can be used to support expression of recombinant glycosyltransferases in L. tarentolae, enabling fully function-customized host cells. The detectable activities for most GTs suggests that the majority of the used IRs are functional and only few, i.e. the ones supporting MGAT2 expression in St17176 were not efficient. Since the contribution of 5′ and 3′ UTRs cannot be clearly distinguished based on the available data, the “non-functional” IRs cannot be unambiguously pinpointed. In addition, heterologous coding sequences could contribute to sequence-mediated mRNA stability.

[0202] However, the quite different N-glycan profiles that are observed for the analyzed strains furthermore support the hypothesis that the intergenic regions actually influence the expression level of the genes they flank.

[0203] To corroborate correct integration Nanopore sequencing was performed for St17311, St17212 and St17180 and confirmed correct integration for all tested constructs (FIG. 6B).

[0204] Next, it was assessed whether multiple of these multi-fragment integrations can be combined within one strain to improve the glycoengineering activity and obtain more homogenous N-glycan conversion. For this, St17238 was created by transfection of linearized DNA fragments from plasmids (pLMTB8253, 8313, 8314, 8236, 8315, 8255, 8259, 6940, 8379) targeting the alpha tubulin locus of an Adalimumab expression strain (St15449). Then, in a second transfection a 9-fragment construct derived from plasmids pLMTB8389, 8301, 8234, 8302, 8235, 8303, 8295, 8297, 8392 was integrated into the pfr locus to generate St17294. Last, St17294 was transfected with DNA fragments obtained from plasmids pLMTB8247, 8285, 8237, 8286, 8238, 8287, 8383, 8282, 6936 to obtain a third GT expression construct in the GP63 locus. Comparison of the resulting strain St17826 with its predecessors by N-glycan analysis of surface proteins depicts a step-wise increase in GT activity resulting in almost homogenous G2 N-glycans (88%) for the final strain (FIG. 7). This corroborates the usefulness of the multi-fragment integration method to achieve integration of multiple enzyme copies into the Leishmania genome and that copy number increases of glycosyltransferases can be achieved by using codon diversified enzymes as well as homologs from different species (here: hs, Homo sapiens; rn, Rattus norvegicus, dr, Danio rerio, gj, Gekko japonicus, ag, Anopheles gambiae).

[0205] To summarize, for enabling correct multiple homologous recombination events in Leishmania tarentolae, heterologous intergenic regions derived from other Leishmania species were successfully used to site-specifically engineer host cells. Furthermore, these heterologous intergenic regions containing regulatory elements were sufficient to drive splicing and expression of the heterologous coding sequences.

### 6.5 Example 5

[0206] Since the heterologous, non-identical sequences were successfully used for correct multiple recombination events by up to ten DNA fragments, generation of an even larger chromosomal integration cluster by using genetic elements from 13 donor fragments was tested. Importantly, an even more engineered strain was subsequently created, by transfecting an existing strain that is capable of galactosylation, St17311 (described in Example 4 and in FIG. 6A), with an expression construct providing it with the proficiency in generating sialic acid needed for the sialylation engineering of N-glycans (International Publication No. WO2019/002512 A2, incorporated by reference in its entirety herein). DNA elements were used to target the alpha tubulin locus using a tandem insertion strategy. The intended expression cassette contained NeuC_{3×Myc}, IrLiH, CgNal, IrLiI, NeuB_{3xHA}, IrLmR, _{3xHA}mmST6, IrLiK NeuA_{3xHA}, IrLiL, hsCST_{3×myc}, IrLiM and SM (pac) followed by 3′UTR, and was inserted into host cells by transfecting St17311 with thirteen donor fragments excised from pLMTB8443, 8528, 8448, 8529, 8509, 8507, 8505, 8531, 8449, 8532, 8517, 8520, 6939 (FIG. 8A). The resulting strain St17527 was further analyzed for its phenotype: 1) by DMB labeling of production of Neu5Ac and CMP-Neu5Ac (FIG. 8B) and 2) for its engineered N-glycan (FIG. 8C). St17527 produced 0.49 nmol/OD Neu5Ac, 0.17 nmol/OD CMP-Neu5Ac, calculated based on a standard curve (not shown). Moreover, protein linked N-glycans showed a significant amount of sialylated N-glycans, with a total of 11.6% sialylated glycoforms (FIG. 8C). These results demonstrate full functionality of the glycoengineering pathway, indicating that the genetic information is completely inserted in L. tarentolae host cells. This was finally confirmed by PacBio sequencing, clearly showing that the genetic system applied successfully generated fully function-customized L. tarentolae host cells.

### 6.6 Example 6

[0207] As previously shown in Example 3, the unwanted integration into the native expression site of the paraflagellar rod protein 1D (Pfr) seemed to support high expression on the integrated construct. Thus, it was assessed whether targeting this locus on purpose in a non-disruptive “tandem” integration manner (in comparison to Example 4) would also lead to high level expression and how this compares to expression from the L. tarentolae rDNA locus (“ssu”). Additionally, a different type of integration into the rDNA locus was tested, in which the 5′ integration site was moved 141 bp towards the transcription initiation site of the rDNA locus to the start of the 18S (ssu) coding sequence. For integration into this site (“Ssu-PolI”), protein expression constructs were equipped with an artificial spliced leader acceptor site to ensure correct processing (FIG. 9A). The 3′ integration site was kept the same as that in the case of the “ssu” locus and thus also caused disruption of one of the ssu expression region.

[0208] A glycoengineering construct for N-glycan conversion to G0 glycoform, encoding 3 orthologs of MGAT1 (drMGAT1, gjMGAT1 and agMGAT1) as well as 1 ortholog of MGAT2 (drMGAT2), was transfected into the three different loci of WT L. tarentolae strains by transfection of either pLMTB8389, 8301, 8234, 8629, 8238, 8287, 8383, 8282, 8822 (for St18332), pLMTB9299, 8301, 8234, 8629, 8238, 8287, 8383, 8384, 8994 (for St18621) or pLMTB8223, 8381, 8301, 8234, 8629, 8238, 8287, 8383, 8281, 9304. The efficiency of these integrations was compared by comparison of the N-glycan profiles released from Leishmania surface glycoproteins. All three integrations resulted in high level conversion to G0. While integration into the two ssu locus variants performed indistinguishably with 99% G0, integration into the new “Pfr” locus resulted in 92% G0 N-glycans (FIG. 9B). The resulting cell lines showed no significant difference in viability, growth or productivity. Thus, the “Pfr” locus represents an additional high expression locus for Leishmania.

[0209] In order to assess further whether there is a difference between the two integration variants for the ssu locus (“Ssu” vs. “Ssu-PolI”, see FIG. 9A), another G0 glycoengineering construct composed of two functional homologs of MGAT1 (sfGNT1, drMGAT1B) and 2 codon usage variants of rat MGAT2 was integrated into the respective loci and combined with a target protein expression construct. The conversion of the sterically more constraint Fc N-glycan of the highly expressed monoclonal antibody serves as a more stringent measure of glycoengineering efficiency.

[0210] Strain St18703 was obtained by transfection of St18344 with linearized fragments from plasmids pLMTB9301, 9070, 8568, 9072, 9080, 9082, 9083, 8461 and 8994 into the “Ssu” locus and subsequent transfection of the resulting strain St18625 with an Adalimumab expression construct (pLMTB6737, 8698, 7084, 6681, 6683). For generation of strain St19042, an Adalimumab expression strain St18607 was transfected with linearized fragments from plasmids pLMTB8223, 8564, 9070, 8568, 9072, 9080, 9082, 9083, 8461 and 8994 to obtain integration of the G0 construct into the “Ssu-PolI” locus.

[0211] Comparison of the Fc N-glycan profiles of Adalimumab purified from these two strains clearly demonstrated a difference between the integration variants and supports superiority of the “Ssu-PolI” integration variant with conversion to 87% G0 while St18703 only obtained 68% G0 (FIG. 9C). Thus, in order to achieve high level conversion the “Ssu-PolI” locus is the most suitable integration locus, but balanced high level expression can also be achieved by targeting the “Pfr” locus or the alternative “Ssu” integration variant.

### 6.7 Example 7

[0212] In order to further explore the opportunities of extending the multiple homologous recombination method, transfection of a genetic element assembled from 25 different donor fragments was attempted. This genetic module combines expression constructs for enzymes of the sialic acid biogenesis pathway (NeuC3×Myc, 3×flagcgNal, NeuB3×HA, NeuA3×HA and 3 codon usage variants of Spinv-A88ST6) with expression constructs for glycosyltransferases. For efficient glycoengineering up to G2, 3 copies of MGAT1, 3 copies of MGAT2 and 2 copies of hsB4GalT were combined by using codon usage variants in the case of hsB4GalT1 and orthologs from different organisms in the cases of MGAT1 and MGAT2. Furthermore, 15 different intergenic regions from 4 previously described Leishmania species were used in this construct to avoid repeated usage of the same sequences. Finally, the selection marker (pac), a 3′UTR as well as flanking sequences for homologous integration in tandem into Pfr locus were included into the construct. Notably, in this case, the selection marker was not situated in the end of the construct, but in between the clusters for glycoengineering.

[0213] For the integration of this construct, WT L. tarentolae (St18344) were transfected with the twentyfive donor fragments excised from plasmids pLMTB8389, 8310, 8234, 8311, 8235, 8312, 8254, 9220, 8528, 8448, 8529, 8509, 9131, 9132, 8449, 9339, 9340, 8333, 8636, 8313, 8236, 8314, 8379, 8315, 9320 (FIG. 10A).

[0214] The phenotype of the resulting strain St18700 was analyzed by N-glycan profiling of its surface glycoproteins. The strain proved to be very proficient in N-glycan conversion up to G2S2, with 90% galactosylated N-glycan species and a total of 43% sialylated N-glycans (FIG. 10A). This suggests full functionality of the glycoengineering pathway, since previously galactosylation of around 90% of the surface glycans could only be obtained by combination of two galactosyltransferase containing modules in different expression loci (compare FIG. 7). Also, long read sequencing of a derived cell line (St19384, see below) confirmed the complete and correct integration of the 30 kbp construct assembled from 25 individual fragments in L. tarentolae. This further underlines the high potential of the novel method in this invention of recombinantly engineering a Leishmania cell that involves homologous recombination of a multitude of DNA fragments.

[0215] Next, the resulting strain was further modified by integration of two additional glycoengineering constructs aiming at improving the conversion to G2S2. First, St18700 was transfected with linearized inserts from plasmids pLMTB8391, 8285, 8237, 8286, 8238, 8287, 8383, 8281 and 8821, which constitute another glycoengineering module with a different codon usage variant of hsB4GalT1, a codon usage variant of rnMGAT2 and two additional orthologs of MGAT1 from different organisms. This modification led to a marked increase in G2 in the surface N-glycan profile of the resulting strain St19084 (FIG. 10B).

[0216] In order to improve sialylation of theses N-glycan species, an additional glycoengineering module containing sfGNT1, a functional homolog of MGAT1, as well as additional codon usage variants of MGAT1 from zebrafish and MGAT2 from rat for boosting the conversion of Man3 to higher modified N-glycan variants was transfected into St19084. Additionally, the module contained another ortholog of the sialyltransferase ST6, ₛₜᵣₑₚCMAS and the sialic acid transporter CST for improved activation and transfer of sialic acid to the protein acceptors. For this transfection, linearized fragments from plasmids pLMTB8223, 8564, 8567,8568,8823,8599, 9486, 8488, 8447, 8490 and 9205 were transfected into the parental strain to obtain strain St19384. In this case, two plasmids, 8223 and 9205 had to be cut with alternative restriction enzymes (HindIII+SmiI or BglII+SmiI) to create the wanted overhangs for homologous recombination. By this transfection, high sialylation of the N-glycans released from surface glycoproteins with 74% G2S2 was obtained (FIG. 10B).

[0217] In order to confirm that all the previously mentioned glycoengineering modules were correctly integrated into this highly modified strain, high molecular weight gDNA from St19384 was prepared and subjected to Nanopore sequencing. By this, correct integration of the three glycoengineering modules in the targeted loci could be confirmed.

[0218] This example ultimately demonstrated the high potential of genetic modifications of L. tarentolae by the techniques described herein for multiple homologous recombination events, in each of the subsequent rounds of engineering. In total 45 linearized fragments were transfected into the cells in order to establish 3 different glycoengineering modules comprised of 7 orthologs or functional homologs of MGAT1, 5 orthologs or codon usage variants of MGAT2, 3 codon usage variants of hsB4GalT1, 4 codon usage variants or orthologs of ST6 and 6 enzymes of the sialic acid biosynthesis pathway. Thus, avoiding repetition of identical sequences in the coding as well as non-coding regions of the constructs as described in detail in previous examples, allows extensive modification of Leishmania cells without unwanted recombinations.

[0219] Confirmation of the reproducibility of extensive strain engineering like the one described before was obtained with strains St20157, St20208 and St20224, which each contain 3 glycoengineering constructs as well as an O-glycosylation knock-out (see International Application entitled “Glycoengineering Using Leishmania Cells” filed even date herewith) and are derived from the common parental strain St19084 (FIG. 10C).

### 6.8 Example 8

[0220] Assembly of a Hybrid Prokaryotic Gene Cluster on an Escherichia coli Cosmid in Leishmania tarentolae.

[0221] The recombinant expression in E. coli of the Streptococcus pneumoniae serotype 1 capsular polysaccharide as lipid-linked oligosaccharide (LLO) requires 10 exogenous genes. Seven genes are present as a cluster in S. pneumoniae, while three genes are present elsewhere in its genome. As the orthologues of these three genes are widespread in prokaryotes, genes from Plesiomonas shigelloides 017, a closer E. coli relative, were chosen, as they were elsewhere proven efficient in their function when recombinantly expressed in E. coli.

[0222] The aim of the experiment is to obtain a functional hybrid cluster cloned into the E. coli-compatible cosmid pLAFR1 (Vanbleu, E. et al. (2004) DNA Seq 15 (3): 225-227) by exploiting L. tarentolae recombination machinery's ability to assemble DNA fragments sharing homologies at their ends. pLAFR1 contains a tetracycline resistance for its selection, and a broad range origin of replication for Enterobacteriaceae. pGVXN775 is a derivative of pLAFR1 in which a multiple cloning site, a constitutive promoter J23114 (Anderson collection), and a transcriptional terminator have been introduced. Its linearization via AsiSI and XhoI allows insertion of DNA fragments between the constitutive promoter and the terminator.

[0223] Eleven fragments were designed as described in FIG. 11A and their synthesis was performed at GENEWIZ Germany GmbH. The following aspects have been taken into account for the design: a) Fragments length should not exceed 2000 bp in order to increase synthesis speed, b) overlap between fragments and between fragment and vector to be 200 bp for optimal homologous recombination efficiency.

[0224] The final construct is designed to contain a selection marker usable in L. tarentolae to be inserted together with the necessary 5′ and 3′ regulatory elements at the 3′ of the gene cluster. The selection marker gene, i.e. streptothricin acetyl transferase (sat), which confer resistance to nourseothricin (NTC), is intact only if recombination takes place as it is split in two fragments. The selection marker cassette is flanked by the restriction enzyme BsiWI for its excision.

[0225] Two sets of recombinations were performed. For one set, called “pLAFR_Sp1” set, the 10 genes needed for the biosynthetic pathway and the selection marker cassette are split into nine fragments and recombined into pGVXN775. The total size of the insert is 14789 bp. The product should be able to convert E. coli in a S. pneumoniae serotype 1 LLO producer. A second set, called “pLAFR_SM” set, is a control strategy in which the selection marker cassette is split into 2 fragments and recombined into pGVXN775. The total size of the insert is 2956 bp.

[0226] Three different transfections in Leishmania tarentolae St10569 have been carried out as summarized in Table 2. For all the transfections, the Biorad transfection method has been followed. In transfection #1 cells have been co-transfected with the AsiSI-XhoI-linearized pGVXN775 and the 9 fragments needed for “pLAFR_Sp1”. Transfection #2 differs from the previous, as the target vector is not linearized. In transfection #3 not linearized pGVXN775 is co-transfected with the two fragment needed for the “pLAFR_SM” set.

[0227] Growing cultures were analyzed by colony PCR using DreamTaq DNA Polymerase (Thermo Fisher Scientific) according to manufacturer's instructions. PCR A uses oligonucleotides o4949 and o4978 and is a positive control for lysis; PCR B uses oligonucleotides o229 and o6775 and amplifies the intersection between pGVXN775 and the 5′ part of the inserted “pLAFR_Sp1” set; PCR C uses oligonucleotides o228 and o6045 and amplifies the intersection between the 3′ part of the inserted “pLAFR_Sp1” set and pGVXN775; PCR D uses oligonucleotides o6517 and o6521 and amplifies an internal sequence of the “pLAFR_Sp1” set; PCR E uses oligonucleotides o5976 and o6776 and amplifies the intersection between the 3′ part of the inserted “pLAFR_SM” and pGVXN775. PCRs A, B, C, D have been applied to cells from transfections #1 and #2, while PCRs A and E have been applied to cells from transfection #3. A polyclone is defined positive when all the applied PCRs yield the expected product band. The number of positive polyclones per transfection is reported in Table 2.

[0228] DNA was isolated from eight PCR-positive L. tarentolae polyclones from transfection #1 (polyclones 1.1, 1.2, 1.3, 1.4, 1.5, 1.6, 1.7, 1.8), three PCR-positive polyclones from transfection #2 (polyclones 2.1, 2.2, 2.3), and two PCR-positive polyclones from transfection #3 (polyclones 3.1, 3.2) using Macherey Nagel NucleoSpin plasmid Miniprep kit, following manufacturer's instructions for low copy E. coli plasmid isolation. The eluted material likely contains episomal and chromosomal DNA. The DNA was used to transform chemical competent E. coli DH5α via heat shock. The transformed colonies were plated on LB-Agar tetracycline plates. The growing colony are able to express the tetracycline-resistance cassette encoded in pGVXN775. One single colony per polyclone was inoculated in liquid LB tetracycline, and plasmid DNA was isolated using Macherey Nagel NucleoSpin plasmid kit, according to manufacturer's instructions.

[0229] E. coli DH5α cells transformed with all plasmids derived from polyclones from transfections #1 and #2 were assessed for their capability to express S. pneumoniae serotype 1 polysaccharide as lipid linked oligosaccharide (LLO). 5 mL LB tetracycline cultures have been grown o/n at 37° C. in shaking culture tubes. The volume corresponding to 2 ODs was centrifuged, the pellet resuspended in Lammli buffer, incubated 10 minutes at 95° C., cooled, supplemented with 2 μL of Proteinase K from Tritirachium album ≥800 units/mL (Sigma-Aldrich P4850), incubated at 55° C. for 1 hour, then at 70° C. for 10 minutes. 10 μL (corresponding to 0.1 OD) have been loaded on 4-12% Bis-Tris polyacrylamide gels for an SDS page. After the run, gel material has been transferred onto a blotting membrane and was detected with an antibody specific for S. pneumoniae serotype 1 polysaccharides. The Western blot on a part of the strains is depicted in FIG. 11B. For transfection #1 8 out of 8 clones showed S. pneumoniae type 1 polysaccharide production, for transfection #2 1 out of 3, as reported in Table 2. The production of the glycan indicates that a correct assembly took place.

[0230] To confirm the correct assembly, and to investigate non-producers, restriction analyses were carried out using standard restriction enzymes (Thermo Fisher Scientific). Plasmids from polyclones 1.1, 1.7, 2.1 and 2.2 were separately digested with BstBI or BsiWI. The tested LLO-positive clones show the expected restriction pattern. A non-producer from transfection #2 (polyclone 2.2) shows also the right pattern, while the non-producer 2.1 shows a negative pattern (FIG. 11C). Polyclones 3.1 and 3.2 from transfection 3 were digested with Sad. The expected pattern for selection marker cassette insertion is observed, as deduced from the comparison with an identical plasmid obtained by conventional cloning, pLMTB6412 (FIG. 11D).

[0231] Plasmids from polyclones 1.1 and 2.2 were further investigated via primer walking Sanger sequencing of the entire cosmid. Polyclone 1.1 shows 100% sequence identity to the expected 35038-bp construct. Polyclone 2.2 showed right restriction pattern but lack of activity. The sequencing shows 99% identity, a GG is deleted causing a frameshift in wbzG, inactivating the production of polysaccharide. The inserted selection marker cassette and its intersections with pGVXN775 of the plasmid from polyclone 3.2 were analyzed via Sanger sequencing, confirming 100% identity to expected sequence.

[0232] Plasmid derived from polyclone 1.1 has been digested via BsiWI in order to remove the selection marker cassette, and religated. The obtained plasmid retains its S. pneumoniae serotype 1 glycan production activity.

[0233] A correct gene assembly has been achieved in 100% of the analyzed plasmids when nine fragments and a linearized vector have been co-transfected (transfection #1). The efficiency of the assembly on a circularized vector seems to be inferior but still a valid option in case of absence of suitable restriction sites as 1 case out of 3 yielded a phenotypic positive with the pLAFR_Sp1 set (transfection #2) and 2 out of 2 positives with the pLAFR_SM set (transfection #3).

TABLE 2
Summary of the analyses on the assembled plasmids

| | | | Polyclones | | | |
|---|---|---|---|---|---|---|
| | | | for | | | |
| Transfection | Transfected DNA | Colony PCR | plasmid | Phenotypic | Restriction | |
| ID | fragments | (nₚₒₛᵢₜᵢᵥₑ/n_{tested)} | isolation | test | analysis | Sequencing |
| #1 | pLMTB7382(SEQ1), | 14/14 | 1.1 | Positive | Positive | Whole |
| | 7383(SEQ2), | | | | | plasmid, |
| | 7384(SEQ3), | | | | | 100% |
| | 7385(SEQ4), | | | | | correct |
| | 7386(SEQ5), | | 1.2 | Positive | NA | NA |
| | 7387(SEQ6), | | 1.3 | Positive | NA | NA |
| | 7388(SEQ7), | | 1.4 | Positive | NA | NA |
| | 7390(SEQ8), | | 1.5 | Positive | NA | NA |
| | 7391(SEQ9), | | 1.6 | Positive | NA | NA |
| | linearized | | 1.7 | Positive | Positive | NA |
| | pGVXN775 | | 1.8 | Positive | NA | NA |
| #2 | pLMTB7382(SEQ1), | 8/9 | 2.1 | Negative | Negative | NA |
| | 7383(SEQ2), | | 2.2 | Negative | Positive | Whole |
| | 7384(SEQ3), | | | | | plasmid, 2- |
| | 7385(SEQ4), | | | | | bp |
| | 7386(SEQ5), | | | | | insertion |
| | 7387(SEQ6), | | 2.3 | Positive | NA | NA |
| | 7388(SEQ7), | | | | | |
| | 7390(SEQ8), | | | | | |
| | 7391(SEQ9), | | | | | |
| | circular pGVXN775, | | | | | |
| #3 | pLMTB7392(SEQA), | 10/10 | 3.1 | NA | Positive | NA |
| | 7393(SEQB), | | 3.2 | NA | Positive | Insert, |
| | circular pGVXN775 | | | | | 100% |
| | | | | | | correct |

### 7. EQUIVALENTS

[0234] The viruses, nucleic acids, methods, host cells, and compositions disclosed herein are not to be limited in scope by the specific embodiments described herein. Indeed, various modifications of the viruses, nucleic acids, methods, host cells, and compositions in addition to those described will become apparent to those skilled in the art from the foregoing description and accompanying figures. Such modifications are intended to fall within the scope of the appended claims.

[0235] Various publications, patents and patent applications are cited herein, the disclosures of which are incorporated by reference in their entireties.

Lengthy table referenced here
US20230048847A1-20230216-T00001
Please refer to the end of the specification for access instructions.

LENGTHY TABLES
The patent application contains a lengthy table section. A copy of the table is available in electronic form from the USPTO web site (https://seqdata.uspto.gov/?pageRequest=docDetail&DocID=US20230048847A1). An electronic copy of the table will also be available from the USPTO upon request and payment of the fee set forth in 37 CFR 1.19(b)(3).

What is claimed:

1. A method of recombinantly engineering a Leishmania cell comprising
(a) introducing two or more DNA fragments into the Leishmania cell, and
(b) incubating the Leishmania cell to allow homologous recombination of the DNA fragments,
wherein a first DNA fragment of the two or more DNA fragments comprises a 5′ homologous region and/or a 3′ homologous region; wherein the 5′ homologous region is homologous to a 3′ homologous region of a second DNA fragment of the two or more DNA fragments or the 3′ homologous region of the first DNA fragment is homologous to a 5′ homologous region of the second DNA fragment; and
wherein the nucleotide sequences of the first and the second DNA fragments outside the homologous region(s) are not homologous to each other; are not homologous to a sequence in the Leishmania cell's genome; and/or have no homologies within the respective DNA fragment.

2. The method of claim 1, wherein each of the two or more DNA fragments comprises a 5′ homologous region and/or a 3′ homologous region; wherein the 5′ homologous region of the each of the two or more DNA fragments is homologous to a 3′ homologous region of another one of the two or more DNA fragments or the 3′ homologous region of the each of the two or more DNA fragments is homologous to a 5′ homologous region of another one of the two or more DNA fragments; and wherein the nucleotide sequences outside the homologous regions in each DNA fragment are not homologous to each other; are not homologous to a sequence in the Leishmania cell's genome; and/or have no homologies within the respective DNA fragment.

3. The method of any one of claims 1 to 2, wherein the two or more DNA fragments, optionally after the two or more DNA fragments are recombined with each other, are suitable for integration into a chromosome of the Leishmania cell.

4. The method of claim 3, wherein the two or more DNA fragments, optionally after the two or more DNA fragments are recombined with each other, are integrated into the chromosome of the Leishmania cell.

5. The method of claim 4, wherein the two or more DNA fragments are integrated in tandem into the paraflagellar rod protein (Pfr) locus.

6. The method of claim 4, wherein the two or more DNA fragments are integrated at the start of the 18S coding region (Ssu-PolI).

7. The method of any one of claims 1 to 2, the two or more DNA fragments, before and/or after recombination with each other, are not integrated in a chromosome of the Leishmania cell.

8. The method of claim 7, wherein the homologous recombination of the two or more DNA fragments results in a circular plasmid.

9. The method of any one of claims 1 to 8, wherein the nucleotide sequence of the first DNA fragment outside the homologous region is at least 10 nucleotides, 20 nucleotides, 30 nucleotides, 40 nucleotides, 50 nucleotides, 100 nucleotides, 200 nucleotides, 300 nucleotides, 400 nucleotides, 500 nucleotides, 600 nucleotides, 700 nucleotides, 800 nucleotides, 900 nucleotides, 1000 nucleotides, 2000 nucleotides, 5000 nucleotides, 10000 nucleotides, 15000 nucleotides, or 20000 nucleotides, 25000 nucleotides, 30000 nucleotides, 35000 nucleotides, 40000 nucleotides, 45000 nucleotides, or at least 50000 nucleotides in length.

10. The method of any one of claims 1 to 9, wherein the nucleotide sequence of the second DNA fragment outside the homologous region is at least 10 nucleotides, 20 nucleotides, 30 nucleotides, 40 nucleotides, 50 nucleotides, 100 nucleotides, 200 nucleotides, 300 nucleotides, 400 nucleotides, 500 nucleotides, 600 nucleotides, 700 nucleotides, 800 nucleotides, 900 nucleotides, 1000 nucleotides, 2000 nucleotides, 5000 nucleotides, 10000 nucleotides, 15000 nucleotides, or 20000 nucleotides, 25000 nucleotides, 30000 nucleotides, 35000 nucleotides, 40000 nucleotides, 45000 nucleotides, or at least 50000 nucleotides in length.

11. The method of any one of claims 1 to 10, wherein the nucleotide sequences of all of the two or more DNA fragments outside the homologous region are at least 10 nucleotides, 20 nucleotides, 30 nucleotides, 40 nucleotides, 50 nucleotides, 100 nucleotides, 200 nucleotides, 300 nucleotides, 400 nucleotides, 500 nucleotides, 600 nucleotides, 700 nucleotides, 800 nucleotides, 900 nucleotides, 1000 nucleotides, 2000 nucleotides, 5000 nucleotides, 10000 nucleotides, 15000 nucleotides, or 20000 nucleotides, 25000 nucleotides, 30000 nucleotides, 35000 nucleotides, 40000 nucleotides, 45000 nucleotides, or at least 50000 nucleotides in length.

12. The method of any one of claims 1 to 11, wherein the homologous recombination of the DNA fragments results in a nucleotide sequence that is 50 nucleotides to 100 nucleotides, 100 nucleotides to 500 nucleotides, 500 nucleotides to 1000 nucleotides, 1000 nucleotides to 5000 nucleotides, 5000 nucleotides to 10000 nucleotides, 10000 nucleotides to 15000 nucleotides, 15000 nucleotides to 20000 nucleotides, 20000 nucleotides to 25000 nucleotides, 25000 nucleotides to 30000 nucleotides, 30000 nucleotides to 35000 nucleotides, 35000 nucleotides to 40000 nucleotides, 40000 nucleotides to 45000 nucleotides, 45000 nucleotides to 50000 nucleotides, 50000 nucleotides to 55000 nucleotides, 55000 nucleotides to 60000 nucleotides, 60000 nucleotides to 65000 nucleotides, 65000 nucleotides to 70000 nucleotides, 70000 nucleotides to 75000 nucleotides, or 75000 nucleotides to 80000 nucleotides in length.

13. The method of any one of claims 1 to 12, wherein the 5′ homologous region and/or the 3′ homologous region of the first DNA fragment is at least 10 nucleotides, 20 nucleotides, 30 nucleotides, 40 nucleotides, 50 nucleotides, 100 nucleotides, 150 nucleotides, 200 nucleotides, 250 nucleotides, 300 nucleotides, 350 nucleotides, 400 nucleotides, 450 nucleotides, or at least 500 nucleotides in length.

14. The method of any one of claims 1 to 13, wherein the 5′ homologous region and/or the 3′ homologous region of the second DNA fragment is at least 10 nucleotides, 20 nucleotides, 30 nucleotides, 40 nucleotides, 50 nucleotides, 100 nucleotides, 150 nucleotides, 200 nucleotides, 250 nucleotides, 300 nucleotides, 350 nucleotides, 400 nucleotides, 450 nucleotides, or at least 500 nucleotides in length.

15. The method of any one of claims 1 to 14, wherein the 5′ homologous region and/or the 3′ homologous region of all of the two or more DNA fragments is at least 10 nucleotides, 20 nucleotides, 30 nucleotides, 40 nucleotides, 50 nucleotides, 100 nucleotides, 150 nucleotides, 200 nucleotides, 250 nucleotides, 300 nucleotides, 350 nucleotides, 400 nucleotides, 450 nucleotides, or at least 500 nucleotides in length.

16. The method of any one of claims 1 to 15, wherein the 5′ homologous region and/or the 3′ homologous region of the first DNA fragment is at most 500 nucleotides, 550 nucleotides, 600 nucleotides, 650 nucleotides, 700 nucleotides, 750 nucleotides, 800 nucleotides, 850 nucleotides, 900 nucleotides, 950 nucleotides, 1000 nucleotides, 1200 nucleotides, 1400 nucleotides, 1600 nucleotides, 1800 nucleotides, 2000 nucleotides, 2200 nucleotides, 2400 nucleotides, 2600 nucleotides, 2800 nucleotides, 3000 nucleotides, 3200 nucleotides, 3400 nucleotides, 3600 nucleotides, 3800 nucleotides, 4000 nucleotides, 4200 nucleotides, 4400 nucleotides, 4600 nucleotides, 4800 nucleotides, or at most 5000 nucleotides in length.

17. The method of any one of claims 1 to 16, wherein the 5′ homologous region and/or the 3′ homologous region of the second DNA fragment is at most 500 nucleotides, 550 nucleotides, 600 nucleotides, 650 nucleotides, 700 nucleotides, 750 nucleotides, 800 nucleotides, 850 nucleotides, 900 nucleotides, 950 nucleotides, 1000 nucleotides, 1200 nucleotides, 1400 nucleotides, 1600 nucleotides, 1800 nucleotides, 2000 nucleotides, 2200 nucleotides, 2400 nucleotides, 2600 nucleotides, 2800 nucleotides, 3000 nucleotides, 3200 nucleotides, 3400 nucleotides, 3600 nucleotides, 3800 nucleotides, 4000 nucleotides, 4200 nucleotides, 4400 nucleotides, 4600 nucleotides, 4800 nucleotides, or at most 5000 nucleotides in length.

18. The method of any one of claims 1 to 17, wherein the 5′ homologous region and/or the 3′ homologous region of all of the two or more DNA fragments is at most 500 nucleotides, 550 nucleotides, 600 nucleotides, 650 nucleotides, 700 nucleotides, 750 nucleotides, 800 nucleotides, 850 nucleotides, 900 nucleotides, 950 nucleotides, 1000 nucleotides, 1200 nucleotides, 1400 nucleotides, 1600 nucleotides, 1800 nucleotides, 2000 nucleotides, 2200 nucleotides, 2400 nucleotides, 2600 nucleotides, 2800 nucleotides, 3000 nucleotides, 3200 nucleotides, 3400 nucleotides, 3600 nucleotides, 3800 nucleotides, 4000 nucleotides, 4200 nucleotides, 4400 nucleotides, 4600 nucleotides, 4800 nucleotides, or at most 5000 nucleotides in length.

19. The method of any one of claims 1 to 18, wherein the 5′ homologous region of the first DNA fragment and the 3′ homologous region of the second DNA fragment have at least 20%, 25%, 30%, 35%, 40%, 45%, 50%, 55%, 60%, 65%, 70%, 75%, 80%, 85%, 90%, 95%, or 100% sequence identity.

20. The method of any one of claims 1 to 18, wherein the 3′ homologous region of the first DNA fragment and the 5′ homologous region of the second DNA fragment have at least 20%, 25%, 30%, 35%, 40%, 45%, 50%, 55%, 60%, 65%, 70%, 75%, 80%, 85%, 90%, 95%, or 100% sequence identity.

21. The method of any one of claims 1 to 20, wherein the two or more DNA fragments are introduced by transfection.

22. The method of any one of claims 1 to 20, wherein the two or more DNA fragments are introduced concurrently.

23. The method of any one of claims 1 to 22, wherein the number of DNA fragments is 2, 3, 4, 5, 6, 7, 8, 9, 10, 11, 12, 13, 14, 15, 16, 17, 18, 19, 20, 21, 22, 23, 24, 25, 26, 27, 28, 29, 30, 31, 32, 33, 34, 35, 36, 37, 37, 39, 40, 41, 42, 43, 44, 45, 46, 47, 48, 49, or 50.

24. The method of any one of claims 1 to 23, wherein the nucleotide sequences of the two or more DNA fragments outside the homologous region are selected from a group consisting of intergenic regions (IRs), untranslated regions (UTRs), and open reading frames (ORFs) encoding polypeptides.

25. The method of claim 24, wherein the IRs, UTRs and ORFs are devoid of homologous sequences within itself, and/or homologous sequences to one another.

26. The method of any one of claims 1 to 25, wherein the nucleotide sequences of the two or more DNA fragments outside the homologous region encode the same polypeptide.

27. The method of claim 26, wherein the Leishmania cell is capable of expressing multiple copies of the same polypeptide.

28. The method of any one of claims 26 and 27, wherein the method increases the expression level of the polypeptide.

29. The method of any one of claims 1 to 26, wherein the homologous recombination of the DNA fragments results in a nucleotide sequence comprising at least 50%, 60%, 70%, 80%, 90% or 100% of genetic information encoded by the two or more DNA fragments.

30. The method of any one of claims 1 to 29, wherein undesired crossing out and/or crossing over occurs in at most 0.01%, 0.05%, 0.1%, 0.5%, 1%, 2%, 3%, 4%, 5%, 6%, 7%, 8%, 9% or at most 10% of the Leishmania cells over a period of at least 1 day, 2 days, 3 days, 4 days, 5 days, 6 days, 7 days, 8 days, 9 days, or at least 10 days.

31. The method of any one of claims 1 to 29, wherein undesired crossing out and/or crossing over occurs in at most 0.01%, 0.05%, 0.1%, 0.5%, 1%, 2%, 3%, 4%, 5%, 6%, 7%, 8%, 9% or at most 10% of the Leishmania cells over at least 1, 2, 3, 4, 5, 6, 7, 8, 9, or at least 10 cell divisions.

32. The method of any one of claims 1 to 31, wherein the Leishmania cell is Leishmania tarentolae.

33. A Leishmania cell recombinantly engineered using the method of any one of claims 1 to 32.

34. The Leishmania cell of claim 33, wherein the Leishmania cell is recombinantly engineered using the method repeatedly.

35. The Leishmania cell of any one of claims 33 to 34, wherein the Leishmania cell is Leishmania tarentolae.

36. A kit comprising one or more containers and instructions for use, wherein said one or more containers comprise the Leishmania cell of any one of claims 33 to 35.

37. A method of making a polypeptide comprising (a) culturing the Leishmania cell of any one of claims 33 to 35 under suitable conditions for polypeptide production; and (b) isolating the polypeptide.

38. The method of claim 37, wherein the method further comprises introducing a nucleotide sequence encoding the polypeptide.

39. A polypeptide produced by the method of any one of claims 37 to 38.

The application's sequence listing, which the Patent Office published only in electronic form, follows.

SEQUENCE LISTING (282 sequences)

SEQ ID NO: 1 - DNA, 20801 bp, Artificial Sequence
  pGVXN775
ctagatttatggctagctcagtcctaggtacaatgctagctactagagattaggaggatcgatagcgatcgcctcgagggccggccggatctgttttggcggatgagagaagaaattcgtcgcccgccataaactgccaggcatcaaattaagcagaaggccatcctgacggatggcctttttgcgtttctacaaactcttcctgtggatccgagctccttaagctgatagctagctcagtcctagggattatgctagctactagagattaggaggactagtcctgaggtacgtaggcgcgccgtgcactgttttggcggatgagagaagaaattcgtcgcccgccataaactgccaggcatcaaattaagcagaaggccatcctgacggatggcctttttgcgtttctacaaactcttcctgttgcacacatgtgaattcacccccgaacacgagcacggcacccgcgaccactatgccaagaatgcccaaggtaaaaattgccggccccgccatgaagtccgtgaatgccccgacggccgaagtgaagggcaggccgccacccaggccgccgccctcactgcccggcacctggtcgctgaatgtcgatgccagcacctgcggcacgtcaatgcttccgggcgtcgcgctcgggctgatcgcccatcccgttactgccccgatcccggcaatggcaaggactgccagcgctgccatttttggggtgaggccgttcgcggccgaggggcgcagcccctggggggatgggaggcccgcgttagcgggccgggagggttcgagaagggggggcaccccccttcggcgtgcgcggtcacgcgcacagggcgcagccctggttaaaaacaaggtttataaatattggtttaaaagcaggttaaaagacaggttagcggtggccgaaaaacgggcggaaacccttgcaaatgctggattttctgcctgtggacagcccctcaaatgtcaataggtgcgcccctcatctgtcagcactctgcccctcaagtgtcaaggatcgcgcccctcatctgtcagtagtcgcgcccctcaagtgtcaataccgcagggcacttatccccaggcttgtccacatcatctgtgggaaactcgcgtaaaatcaggcgttttcgccgatttgcgaggctggccagctccacgtcgccggccgaaatcgagcctgcccctcatctgtcaacgccgcgccgggtgagtcggcccctcaagtgtcaacgtccgcccctcatctgtcagtgagggccaagttttccgcgaggtatccacaacgccggcggccgcggtgtctcgcacacggcttcgacggcgtttctggcgcgtttgcagggccatagacggccgccagcccagcggcgagggcaaccagcccggtgagcgtcggaaaggcgctggaagccccgtagcgacgcggagaggggcgagacaagccaagggcgcaggctcgatgcgcagcacgacatagccggttctcgcaaggacgagaatttccctgcggtgcccctcaagtgtcaatgaaagtttccaacgcgagccattcgcgagagccttgagtccacgctagatctgcctcgctggcctgccgcagttcttcaacctcccggcgcagcttttcgttctcaatttcagcatccctttcggcataccattttatgacggcggcagagtcataaagcacctcattacccttgccaccgcctcgcagaacgggcattccctgttcctgccagttctgaatggtacggatactcgcaccgaaaatgtcagccagctgctttttgttgacttccattgttcattccacggacaaaaacagagaaaggaaacgacagaggccaaaaagctcgctttcagcacctgtcgtttcctttcttttcagagggtattttaaataaaaacattaagttatgacgaagaagaacggaaacgccttaaaccggaaaattttcataaatagcgaaaacccgcgaggtcgccgccccgtaacaaggcggatcgccggaaaggacccgcaaatgataataattatcaattgcatactatcgacggcactgctgccagataacaccaccggggaaacattccatcatgatggccgtgcggacataggaagccagttcatccatcgctttcttgtctgctgccatttgctttgtgacatccagcgccgcacattcagcagcgtttttcagcgcgttttcgatcaacgtttcaatgttggtatcaacaccaggtttaactttgaacttatcggcactgacggttaccttgttctgcgctggctcatcacgctggataccaaggctgatgttgtagatattggtcaccggctgaggtgtttcgattgccgctgcgtggatagcaccatttgcgatagcggcgtccttgatgaatgacactccattgcgaataagttcgaaggagacggtgtcacgaatgcgctggtccagctcgtcgattgccttttgtgcagcagaggtatcaatctcaacgccaagcgtcatcgaagcgcaatattgctgctcaccaaaacgcgtattgaccaggtgttcaacggcaaatttctgcccttctgatgtcagaaaggtaaagtgattttctttctggtattcagttgctgtgtgtctggtttcagcaaaaccaagctcgcgcaattcggctgtgccagatttagaaggcagatcaccagacagcaacgcgccacggaaaaacagcgcatacagaacatccgtcgccgcgccggacaacgtgataattttatgacccatgatttatttccttttagacgtgagcctgtcgcacagcaaagccgccgaaagttaacggtttgcccaggctcacaactgaaagactttctacggtgtgcgcgtgcgatgcgcgtagaagactgatttatcaacctgtctttatatcaggattcattacctgactatttgtgggtaaagttcgtagtgcgctgatcgtgcaaaatgattttagttgggaacagttcgcaactctgtcccataaaaatcagcatattcccatctatcccatatccagcgcattgaccatcgggatactgaagggagattccatcatctcttagaaagatcaccatctcttttgtttcaatttgcatatagctacctggaggatttatgaatacaaggattttcatggactattaccatgagattgattttccatctttattcgcgagagcagtggaaagcgatgacgatgtgggtactacattgcgcattcacctactttgtgagcgcatggtcgaagcatggatatgcgcatgctgtgactgccaagatctatctcatctgcgcaaggcagaacgtgaagacggccgccctggacctcgcccgcgagcgccaggcgcacgaggccggcgcgcggacccgcgccacggcccacgagcggacgccgcagcaggagcgccagaaggccgccagagaggccgagcgcggccgtgaggcttggacgctagggcagggcatgaaaaagcccgtagcgggctgctacgggcgtctgacgcggtggaaagggggaggggatgttgtctacatggctctgctgtagtgagtgggttgcgctccggcagcggtcctgatcaatcgtcaccctttctcggtccttcaacgttcctgacaacgagcctccttttcgccaatccatcgacaatcaccgcgagtccctgctcgaacgctgcgtccggaccggcttcgtcgaaggcgtctatcgcggcccgcaacagcggcgagagcggagcctgttcaacggtgccgccgcgctcgccggcatcgctgtcgccggcctgctcctcaagcacggccccaacagtgaagtagctgattgtcatcagcgcattgacggcgtccccggccgaaaaacccgcctcgcagaggaagcgaagctgcgcgtcggccgtttccatctgcggtgcgcccggtcgcgtgccggcatggatgcgcgcgccatcgcggtaggcgagcagcgcctgcctgaagctgcgggcattcccgatcagaaatgagcgccagtcgtcgtcggctctcggcaccgaatgcgtatgattctccgccagcatggcttcggccagtgcgtcgagcagcgcccgcttgttcctgaagtgccagtaaagcgccggctgctgaacccccaaccgttccgccagtttgcgtgtcgtcagaccgtctacgccgacctcgttcaacaggtccagggcggcacggatcactgtattcggctgcaactttgtcatgcttgacactttatcactgataaacataatatgtccaccaacttatcagtgataaagaatccgcgcgttcaatcggaccagcggaggctggtccggaggccagacgtgaaacccaacatacccctgatcgtaattctgagcactgtcgcgctcgacgctgtcggcatcggcctgattatgccggtgctgccgggcctcctgcgcgatctggttcactcgaacgacgtcaccgcccactatggcattctgctggcgctgtatgcgttggtgcaatttgcctgcgcacctgtgctgggcgcgctgtcggatcgtttcgggcggcggccaatcttgctcgtctcgctggccggcgccactgtcgactacgccatcatggcgacagcgcctttcctttgggttctctatatcgggcggatcgtggccggcatcaccggggcgactggggcggtagccggcgcttatattgccgatatcactgatggcgatgagcgcgcgcggcacttcggcttcatgagcgcctgtttcgggttcgggatggtcgcgggacctgtgctcggtgggctgatgggcggtttctccccccacgctccgttcttcgccgcggcagccttgaacggcctcaatttcctgacgggctgtttccttttgccggagtcgcacaaaggcgaacgccggccgttacgccgggaggctctcaacccgctcgcttcgttccggtgggcccggggcatgaccgtcgtcgccgccctgatggcggtcttcttcatcatgcaacttgtcggacaggtgccggccgcgctttgggtcattttcggcgaggatcgctttcactgggacgcgaccacgatcggcatttcgcttgccgcatttggcattctgcattcactcgcccaggcaatgatcaccggccctgtagccgcccggctcggcgaaaggcgggcactcatgctcggaatgattgccgacggcacaggctacatcctgcttgccttcgcgacacggggatggatggcgttcccgatcatggtcctgcttgcttcgggtggcatcggaatgccggcgctgcaagcaatgttgtccaggcaggtggatgaggaacgtcaggggcagctgcaaggctcactggcggcgctcaccagcctgacctcgatcgtcggacccctcctcttcacggcgatctatgcggcttctataacaacgtggaacgggtgggcatggattgcaggcgctgccctctacttgctctgcctgccggcgctgcgtcgcgggctttggagcggcgcagggcaacgagccgatcgctgatcgtggaaacgataggcctatgccatgcgggtcaaggcgacttccggcaagctatacgcgccctaggagtgcggttggaacgttggcccagccagatactcccgatcacgagcaggacgccgatgatttgaagcgcactcagcgtctgatccaagaacaaccatcctagcaacacggcggtccccgggctgagaaagcccagtaaggaaacaactgtaggttcgagtcgcgagatcccccggaaccaaaggaagtaggttaaacccgctccgatcaggccgagccacgccaggccgagaacattggttcctgtaggcatcgggattggcggatcaaacactaaagctactggaacgagcagaagtcctccggccgccagttgccaggcggtaaaggtgagcagaggcacgggaggttgccacttgcgggtcagcacggttccgaacgccatggaaaccgcccccgccaggcccgctgcgacgccgacaggatctagcgctgcgtttggtgtcaacaccaacagcgccacgcccgcagttccgcaaatagcccccaggaccgccatcaatcgtatcgggctacctagcagagcggcagagatgaacacgaccatcagcggctgcacagcgcctaccgtcgccgcgaccccgcccggcaggcggtagaccgaaataaacaacaagctccagaatagcgaaatattaagtgcgccgaggatgaagatgcgcatccaccagattcccgttggaatctgtcggacgatcatcacgagcaataaacccgccggcaacgcccgcagcagcataccggcgacccctcggcctcgctgttcgggctccacgaaaacgccggacagatgcgccttgtgagcgtccttggggccgtcctcctgtttgaagaccgacagcccaatgatctcgccgtcgatgtaggcgccgaatgccacggcatctcgcaaccgttcagcgaacgcctccatgggctttttctcctcgtgctcgtaaacggacccgaacatctctggagctttcttcagggccgacaatcggatctcgcggaaatcctgcacgtcggccgctccaagccgtcgaatctgagccttaatcacaattgtcaattttaatcctctgtttatcggcagttcgtagagcgcgccgtgcgtcccgagcgatactgagcgaagcaagtgcgtcgagcagtgcccgcttgttcctgaaatgccagtaaagcgctggctgctgaacccccagccggaactgaccccacaaggccctagcgtttgcaatgcaccaggtcatcattgacccaggcgtgttccaccaggccgctgcctcgcaactcttcgcaggcttcgccgacctgctcgcgccacttcttcacgcgggtggaatccgatccgcacatgaggcggaaggtttccagcttgagcgggtacggctcccggtgcgagctgaaatagtcgaacatccgtcgggccgtcggcgacagcttgcggtacttctcccatatgaatttcgtgtagtggtcgccagcaaacagcacgacgatttcctcgtcgatcaggacctggcaacgggacgttttcttgccacggtccaggacgcggaagcggtgcagcagcgacaccgattccaggtgcccaacgcggtcggacgtgaagcccatcgccgtcgcctgtaggcgcgacaggcattcctcggccttcgtgtaataccggccattgatcgaccagcccaggtcctggcaaagctcgtagaacgtgaaggtgatcggctcgccgataggggtgcgcttcgcgtactccaacacctgctgccacaccagttcgtcatcgtcggcccgcagctcgacgccggtgtaggtgatcttcacgtccttgttgacgtggaaaatgaccttgttttgcagcgcctcgcgcgggattttcttgttgcgcgtggtgaacagggcagagcgggccgtgtcgtttggcatcgctcgcatcgtgtccggccacggcgcaatatcgaacaaggaaagctgcatttccttgatctgctgcttcgtgtgtttcagcaacgcggcctgcttggcctcgctgacctgttttgccaggtcctcgccggcggtttttcgcttcttggtcgtcatagttcctcgcgtgtcgatggtcatcgacttcgccaaacctgccgcctcctgttcgagacgacgcgaacgctccacggcggccgatggcgcgggcagggcagggggagccagttgcacgctgtcgcgctcgatcttggccgtagcttgctggaccatcgagccgacggactggaaggtttcgcggggcgcacgcatgacggtgcggcttgcgatggtttcggcatcctcggcggaaaaccccgcgtcgatcagttcttgcctgtatgccttccggtcaaacgtccgattcattcaccctccttgcgggattgccccgactcacgccggggcaatgtgcccttattcctgatttgacccgcctggtgccttggtgtccagataatccaccttatcggcaatgaagtcggtcccgtagaccgtctggccgtccttctcgtacttggtattccgaatcttgccctgcacgaataccagcgaccccttgcccaaatacttgccgtgggcctcggcctgagagccaaaacacttgatgcggaagaagtcggtgcgctcctgcttgtcgccggcatcgttgcgccactcttcattaaccgctatatcgaaaattgcttgcggcttgttagaattgccatgacgtacctcggtgtcacgggtaagattaccgataaactggaactgattatggctcatatcgaaagtctccttgagaaaggagactctagtttagctaaacattggttccgctgtcaagaactttagcggctaaaattttgcgggccgcgaccaaaggtgcgaggggcggcttccgctgtgtacaaccagatatttttcaccaacatccttcgtctgctcgatgagcggggcatgacgaaacatgagctgtcggagagggcaggggtttcaatttcgtttttatcagacttaaccaacggtaaggccaacccctcgttgaaggtgatggaggccattgccgacgccctggaaactcccctacctcttctcctggagtccaccgaccttgaccgcgaggcactcgcggagattgcgggtcatcctttcaagagcagcgtgccgcccggatacgaacgcatcagtgtggttttgccgtcacataaggcgtttatcgtaaagaaatggggcgacgacacccgaaaaaagctgcgtggaaggctctgacgccaagggttagggcttgcacttccttctttagccgctaaaacggccccttctctgcgggccgtcggctcgcgcatcatatcgacatcctcaacggaagccgtgccgcgaatggcatcgggcgggtgcgctttgacagttgttttctatcagaacccctacgtcgtgcggttcgattagctgtttgtcttgcaggctaaacactttcggtatatcgtttgcctgtgcgataatgttgctaatgatttgttgcgtaggggttactgaaaagtgagcgggaaagaagagtttcagaccatcaaggagcgggccaagcgcaagctggaacgcgacatgggtgcggacctgttggccgcgctcaacgacccgaaaaccgttgaagtcatgctcaacgcggacggcaaggtgtggcacgaacgccttggcgagccgatgcggtacatctgcgacatgcggcccagccagtcgcaggcgattatagaaacggtggccggattccacggcaaagaggtcacgcggcattcgcccatcctggaaggcgagttccccttggatggcagccgctttgccggccaattgccgccggtcgtggccgcgccaacctttgcgatccgcaagcgcgcggtcgccatcttcacgctggaacagtacgtcgaggcgggcatcatgacccgcgagcaatacgaggtcattaaaagcgccgtcgcggcgcatcgaaacatcctcgtcattggcggtactggctcgggcaagaccacgctcgtcaacgcgatcatcaatgaaatggtcgccttcaacccgtctgagcgcgtcgtcatcatcgaggacaccggcgaaatccagtgcgccgcagagaacgccgtccaataccacaccagcatcgacgtctcgatgacgctgctgctcaagacaacgctgcgtatgcgccccgaccgcatcctggtcggtgaggtacgtggccccgaagcccttgatctgttgatggcctggaacaccgggcatgaaggaggtgccgccaccctgcacgcaaacaaccccaaagcgggcctgagccggctcgccatgcttatcagcatgcacccggattcaccgaaacccattgagccgctgattggcgaggcggttcatgtggtcgtccatatcgccaggacccctagcggccgtcgagtgcaagaaattctcgaagttcttggttacgagaacggccagtacatcaccaaaaccctgtaaggagtatttccaatgacaacggctgttccgttccgtctgaccatgaatcgcggcattttgttctaccttgccgtgttcttcgttctcgctctcgcgttatccgcgcatccggcgatggcctcggaaggcaccggcggcagcttgccatatgagagctggctgacgaacctgcgcaactccgtaaccggcccggtggccttcgcgctgtccatcatcggcatcgtcgtcgccggcggcgtgctgatcttcggcggcgaactcaacgccttcttccgaaccctgatcttcctggttctggtgatggcgctgctggtcggcgcgcagaacgtgatgagcaccttcttcggtcgtggtgccgaaatcgcggccctcggcaacggggcgctgcaccaggtgcaagtcgcggcggcggatgccgtgcgtgcggtagcggctggacggctcgcctaatcatggctctgcgcacgatccccatccgtcgcgcaggcaaccgagaaaacctgttcatgggtggtgatcgtgaactggtgatgttctcgggcctgatggcgtttgcgctgattttcagcgcccaagagctgcgggccaccgtggtcggtctgatcctgtggttcggggcgctctatgcgttccgaatcatggcgaaggccgatccgaagatgcggttcgtgtacctgcgtcaccgccggtacaagccgtattacccggcccgctcgaccccgttccgcgagaacaccaatagccaagggaagcaataccgatgatccaagcaattgcgattgcaatcgcgggcctcggcgcgcttctgttgttcatcctctttgcccgcatccgcgcggtcgatgccgaactgaaactgaaaaagcatcgttccaaggacgccggcctggccgatctgctcaactacgccgctgtcgtcgatgacggcgtaatcgtgggcaagaacggcagctttatggctgcctggctgtacaagggcgatgacaacgcaagcagcaccgaccagcagcgcgaagtagtgtccgcccgcatcaaccaggccctcgcgggcctgggaagtgggtggatgatccatgtggacgccgtgcggcgtcctgctccgaactacgcggagcggggcctgtcggcgttccctgaccgtctgacggcagcgattgaagaagagcgctcggtcttgccttgctcgtcggtgatgtacttcaccagctccgcgaagtcgctcttcttgatggagcgcatggggacgtgcttggcaatcacgcgcaccccccggccgttttagcggctaaaaaagtcatggctctgccctcgggcggaccacgcccatcatgaccttgccaagctcgtcctgcttctcttcgatcttcgccagcagggcgaggatcgtggcatcaccgaaccgcgccgtgcgcgggtcgtcggtgagccagagtttcagcaggccgcccaggcggcccaggtcgccattgatgcgggccagctcgcggacgtgctcatagtccacgacgcccgtgattttgtagccctggccgacggccagcaggtaggccgacaggctcatgccggccgccgccgccttttcctcaatcgctcttcgttcgtctggaaggcagtacaccttgataggtgggctgcccttcctggttggcttggtttcatcagccatccgcttgccctcatctgttacgccggcggtagccggccagcctcgcagagcaggattcccgttgagcaccgccaggtgcgaataagggacagtgaagaaggaacacccgctcgcgggtgggcctacttcacctatcctgcccggctgacgccgttggatacaccaaggaaagtctacacgaaccctttggcaaaatcctgtatatcgtgcgaaaaaggatggatataccgaaaaaatcgctataatgaccccgaagcagggttatgcagcggaaaagcgctgcttccctgctgttttgtggaatatctaccgactggaaacaggcaaatgcaggaaattactgaactgaggggacaggcgagagacgatgccaaagagctacaccgacgagctggccgagtgggttgaatcccgcgcggccaagaagcgccggcgtgatgaggctgcggttgcgttcctggcggtgagggcggatgtcgaggcggcgttagcgtccggctatgcgctcgtcaccatttgggagcacatgcgggaaacggggaaggtcaagttctcctacgagacgttccgctcgcacgccaggcggcacatcaaggccaagcccgccgatgtgcccgcaccgcaggccaaggctgcggaacccgcgccggcacccaagacgccggagccacggcggccgaagcaggggggcaaggctgaaaagccggcccccgctgcggccccgaccggcttcaccttcaacccaacaccggacaaaaaggatctactgtaatggcgaaaattcacatggttttgcagggcaagggcggggtcggcaagtcggccatcgccgcgatcattgcgcagtacaagatggacaaggggcagacacccttgtgcatcgacaccgacccggtgaacgcgacgttcgagggctacaaggccctgaacgtccgccggctgaacatcatggccggcgacgaaattaactcgcgcaacttcgacaccctggtcgagctgattgcgccgaccaaggatgacgtggtgatcgacaacggtgccagctcgttcgtgcctctgtcgcattacctcatcagcaaccaggtgccggctctgctgcaagaaatggggcatgagctggtcatccataccgtcgtcaccggcggccaggctctcctggacacggtgagcggcttcgcccagctcgccagccagttcccggccgaagcgcttttcgtggtctggctgaacccgtattgggggcctatcgagcatgagggcaagagctttgagcagatgaaggcgtacacggccaacaaggcccgcgtgtcgtccatcatccagattccggccctcaaggaagaaacctacggccgcgatttcagcgacatgctgcaagagcggctgacgttcgaccaggcgctggccgatgaatcgctcacgatcatgacgcggcaacgcctcaagatcgtgcggcgcggcctgtttgaacagctcgacgcggcggccgtgctatgagcgaccagattgaagagctgatccgggagattgcggccaagcacggcatcgccgtcggccgcgacgacccggtgctgatcctgcataccatcaacgcccggctcatggccgacagtgcggccaagcaagaggaaatccttgccgcgttcaaggaagagctggaagggatcgcccatcgttggggcgaggacgccaaggccaaagcggagcggatgctgaacgcggccctggcggccagcaaggacgcaatggcgaaggtaatgaaggacagcgccgcgcaggcggccgaagcgatccgcagggaaatcgacgacggccttggccgccagctcgcggccaaggtcgcggacgcgcggcgcgtggcgatgatgaacatgatcgccggcggcatggtgttgttcgcggccgccctggtggtgtgggcctcgttatgaatcgcagaggcgcagatgaaaaagcccggcgttgccgggctttgtttttgcgttagctgggcttgtttgacaggcccaagctctgactgcgcccgcgctcgcgctcctgggcctgtttcttctcctgctcctgcttgcgcatcagggcctggtgccgtcgggctgcttcacgcatcgaatcccagtcgccggccagctcgggatgctccgcgcgcatcttgcgcgtcgccagttcctcgatcttgggcgcgtgaatgcccatgccttccttgatttcgcgcaccatgtccagccgcgtgtgcagggtctgcaagcgggcttgctgttgggcctgctgctgctgccaggcggcctttgtacgcggcagggacagcaagccgggggcattggactgtagctgctgcaaacgcgcctgctgacggtctacgagctgttctaggcggtcctcgatgcgctccacctggtcatgctttgcctgcacgtagagcgcaagggtctgctggtaggtctgctcgatgggcgcggattctaagagggcctgctgttccgtctcggcctcctgggccgcctgtagcaaatcctcgccgctgttgccgctggactgctttactgccggggactgctgttgccctgctcgcgccgtcgtcgcagttcggcttgcccccactcgattgactgcttcatttcgagccgcagcgatgcgatctcggattgcgtcaacggacggggcagcgcggaggtgtccggcttctccttgggtgagtcggtcgatgccatagccaaaggtttccttccaaaatgcgtccattgctggaccgtgtttctcattgatgcccgcaagcatcttcggcttgaccgccaggtcaagcgcgccttcatgggcggtcatgacggacgccgccatgaccttgccgccgttgttctcgatgtagccgcgtaatgaggcaatggtgccgcccatcgtcagcgtgtcatcgacaacgatgtacttctggccggggatcacctccccctcgaaagtcgggttgaacgccaggcgatgatctgaaccggctccggttcgggcgaccttctcccgctgcacaatgtccgtttcgacctcaaggccaaggcggtcggccagaacgaccgccatcatggccggaatcttgttgttccccgccgcctcgacggcgaggactggaacgatgcggggcttgtcgtcgccgatcagcgtcttgagctgggcaacagtgtcgtccgaaatcaggcgctcgaccaaattaagcgccgcttccgcgtcgccctgcttcgcagcctggtattcaggctcgttggtcaaagaaccaaggtcgccgttgcgaaccaccttcgggaagtctccccacggtgcgcgctcggctctgctgtagctgctcaagacgcctccctttttagccgctaaaactctaacgagtgcgcccgcgactcaacttgacgctttcggcacttacctgtgccttgccacttgcgtcataggtgatgcttttcgcactcccgatttcaggtactttatcgaaatctgaccgggcgtgcattacaaagttcttccccacctgttggtaaatgctgccgctatctgcgtggacgatgctgccgtcgtggcgctgcgacttatcggccttttgggccatatagatgttgtaaatgccaggtttcagggccccggctttatctaccttctggttcgtccatgcgccttggttctcggtctggacaattctttgcccattcatgaccaggaggcggtgtttcattgggtgactcctgacggttgcctctggtgttaaacgtgtcctggtcgcttgccggctaaaaaaaagccgacctcggcagttcgaggccggctttccctagagccgggcgcgtcaaggttgttccatctattttagtgaactgcgttcgatttatcagttactttcctcccgctttgtgtttcctcccactcgtttccgcgtctagccgacccctcaacatagcggcctcttcttgggctgcctttgcctcttgccgcgcttcgtcacgctcggcttgcaccgtcgtaaagcgctcggcctgcctggccgcctcttgcgccgccaacttcctttgctcctggtgggcctcggcgtcggcctgcgccttcgctttcaccgctgccaactccgtgcgcaaactctccgcttcgcgcctggtggcgtcgcgctcgccgcgaagcgcctgcatttcctggttggccgcgtccagggtcttgcggctctcttctttgaatgcgcgggcgtcctggtgagcgtagtccagctcggcgcgcagctcctgcgctcgacgctccacctcgtcggcccgctgcgtcgccagcgcggcccgctgctcggctcctgccagggcggtgcgtgcttcggccagggcttgccgctggcgtgcggccagctcggccgcctcggcggcctgctgctctagcaatgtaacgcgcgcctgggcttcttccagctcgcgggcctgcgcctcgaaggcgtcggccagctccccgcgcacggcttccaactcgttgcgctcacgatcccagccggcttgcgctgcctgcaacgattcattggcaagggcctgggcggcttgccagagggcggccacggcctggttgccggcctgctgcaccgcgtccggcacctggactgccagcggggcggcctgcgccgtgcgctggcgtcgccattcgcgcatgccggcgctggcgtcgttcatgttgacgcgggcggccttacgcactgcatccacggtcgggaagttctcccggtcgccttgctcgaacagctcgtccgcagccgcaaaaatgcggtcgcgcgtctctttgttcagttccatgttggctccggtaattggtaagaataataatactcttacctaccttatcagcgcaagagtttagctgaacagttctcgacttaacggcaggttttttagcggctgaagggcaggcaaaaaaagccccgcacggtcggcgggggcaaagggtcagcgggaaggggattagcgggcgtcgggcttcttcatgcgtcggggccgcgcttcttgggatggagcacgacgaagcgcgcacgcgcatcgtcctcggccctatcggcccgcgtcgcggtcaggaacttgtcgcgcgctaggtcctccctggtgggcaccaggggcatgaactcggcctgctcgatgtaggtccactccatgaccgcatcgcagtcgaggccgcgttccttcaccgtctcttgcaggtcgcggtacgcccgctcgttgagcggctggtaacgggccaattggtcgtaaatggctgtcggccatgagcggcctttcctgttgagccagcagccgacgacgaagccggcaatgcaggcccctggcacaaccaggccgacgccgggggcaggggatggcagcagctcgccaaccaggaaccccgccgcgatgatgccgatgccggtcaaccagcccttgaaactatccggccccgaaacacccctgcgcattgcctggatgctgcgccggatagcttgcaacatcaggagccgtttcttttgttcgtcagtcatggtccgccctcaccagttgttcgtatcggtgtcggacgaactgaaatcgcaagagctgccggtatcggtccagccgctgtccgtgtcgctgctgccgaagcacggcgaggggtccgcgaacgccgcagacggcgtatccggccgcagcgcatcgcccagcatggccccggtcagcgagccgccggccaggtagcccagcatggtgctgttggtcgccccggccaccagggccgacgtgacgaaatcgccgtcattccctctggattgttcgctgctcggcggggcagtgcgccgcgccggcggcgtcgtggatggctcgggttggctggcctgcgacggccggcgaaaggtgcgcagcagctcgttatcgaccggctgcggcgtcggggccgccgccttgcgctgcggtcggtgttccttcttcggctcgcgcagcttgaacagcatgatcgcggaaaccagcagcaacgccgcgcctacgcctcccgcgatgtagaacagcatcggattcattcttcggtcctccttgtagcggaaccgttgtctgtgcggcgcgggtggcccgcgccgctgtctttggggatcagccctcgatgagcgcgaccagtttcacgtcggcaaggttcgcctcgaactcctggccgtcgtcctcgtacttcaaccaggcatagccttccgccggcggccgacggttgaggataaggcgggcagggcgctcgtcgtgctcgacctggacgatggcctttttcagcttgtccgggtccggctccttcgcgcccttttccttggcgtccttaccgtcctggtcgccgtcctcgccgtcctggccgtcgccggcctccgcgtcacgctcggcatcagtctggccgttgaaggcatcgacggtgttgggatcgcggcccttctcgtccaggaactcgcgcagcagcttgaccgtgccgcgcgtgatttcctgggtgtcgtcgtcaagccacgcctcgacttcctccgggcgcttcttgaaggccgtcaccagctcgttcaccacggtcacgtcgcgcacgcggccggtgttgaacgcatcggcgatcttctccggcaggtccagcagcgtgacgtgctgggtgatgaacgccggcgacttgccgatttccttggcgatatcgcctttcttcttgcccttcgccagctcgcggccaatgaagtcggcaatttcgcgcggggtcagctcgttgcgttgcaggttctcgataacctggtcggcttcgttgtagtcgttgtcgatgaacgccgggatggacttcttgccggcccacttcgagccacggtagcggcgggcgccgtgattgatgatatagcggcccggctgctcctggttctcgcgcaccgaaatgggtgacttcaccccgcgctctttgatcgtggcaccgatttccgcgatgctctccggggaaaagccggggttgtcggccgtccgcggctgatgcggatcttcgtcgatcaggtccaggtccagctcgatagggccggaaccgccctgagacgccgcaggagcgtccaggaggctcgacaggtcgccgatgctatccaaccccaggccggacggctgcgccgcgcctgcggcttcctgagcggccgcagcggtgtttttcttggtggtcttggcttgagccgcagtcattgggaaatctccatcttcgtgaacacgtaatcagccagggcgcgaacctctttcgatgccttgcgcgcggccgttttcttgatcttccagaccggcacaccggatgcgagggcatcggcgatgctgctgcgcaggccaacggtggccggaatcatcatcttggggtacgcggccagcagctcggcttggtggcgcgcgtggcgcggattccgcgcatcgaccttgctgggcaccatgccaaggaattgcagcttggcgttcttctggcgcacgttcgcaatggtcgtgaccatcttcttgatgccctggatgctgtacgcctcaagctcgatgggggacagcacatagtcggccgcgaagagggcggccgccaggccgacgccaagggtcggggccgtgtcgatcaggcacacgtcgaagccttggttcgccagggccttgatgttcgccccgaacagctcgcgggcgtcgtccagcgacagccgttcggcgttcgccagtaccgggttggactcgatgagggcgaggcgcgcggcctggccgtcgccggctgcgggtgcggtttcggtccagccgccggcagggacagcgccgaacagcttgcttgcatgcaggccggtagcaaagtccttgagcgtgtaggacgcattgccctgggggtccaggtcgatcacggcaacccgcaagccgcgctcgaaaaagtcgaaggcaagatgcacaagggtcgaagtcttgccgacgccgcctttctggttggccgtgaccaaagttttcatcgtttggtttcctgttttttcttggcgtccgcttcccacttccggacgatgtacgcctgatgttccggcagaaccgccgttacccgcgcgtacccctcgggcaagttcttgtcctcgaacgcggcccacacgcgatgcaccgcttgcgacactgcgcccctggtcagtcccagcgacgttgcgaacgtcgcctgtggcttcccatcgactaagacgccccgcgctatctcgatggtctgctgccccacttccagcccctggatcgcctcctggaactggctttcggtaagccgtttcttcatggataacacccataatttgctccgcgccttggttgaacatagcggtgacagccgccagcacatgagagaagtttagctaaacatttctcgcacgtcaacacctttagccgctaaaactcgtccttggcgtaacaaaacaaaagcccggaaaccgggctttcgtctcttgccgcttatggctctgcacccggctccatcaccaacaggtcgcgcacgcgcttcactcggttgcggatcgacactgccagcccaacaaagccggttgccgccgccgccaggatcgcgccgatgatgccggccacaccggccatcgcccaccaggtcgccgccttccggttccattcctgctggtactgcttcgcaatgctggacctcggctcaccataggctgaccgctcgatggcgtatgccgcttctccccttggcgtaaaacccagcgccgcaggcggcattgccatgctgcccgccgctttcccgaccacgacgcgcgcaccaggcttgcggtccagaccttcggccacggcgagctgcgcaaggacataatcagccgccgacttggctccacgcgcctcgatcagctcttgcactcgcgcgaaatccttggcctccacggccgccatgaatcgcgcacgcggcgaaggctccgcagggccggcgtcgtgatcgccgccgagaatgcccttcaccaagttcgacgacacgaaaatcatgctgacggctatcaccatcatgcagacggatcgcacgaacccgctgaattcaccggtt

SEQ ID NO: 2 - DNA, 8460 bp, Artificial Sequence
  pLMTB3857
tcgcgcgtttcggtgatgacggtgaaaacctctgacacatgcagctcccggagacggtcacagcttgtctgtaagcggatgccgggagcagacaagcccgtcagggcgcgtcagcgggtgttggcgggtgtcggggctggcttaactatgcggcatcagagcagattgtactgagagtgcaccatatgcggtgtgaaataccgcacagatgcgtaaggagaaaataccgcatcaggcgccattcgccattcaggctgcgcaactgttgggaagggcgatcggtgcgggcctcttcgctattacgccagctggcgaaagggggatgtgctgcaaggcgattaagttgggtaacgccagggttttcccagtcacgacgttgtaaaacgacggccagtgaattgacgcgtattgggatatttaaattggataacttggcgaaacgccaagctaatacatgaaccaaccgggtgttctccactccagacggtgggcaaccatcgtcgtgagacgcccagcgaatgaatgacagtaaaaccaatgccttcactggcagtaacacccagcagtgttgactcaattcattccgtgcgaaagccggcttgttccggcgtcttttgacgaacaactgccctatcagctggtgatggccgtgtagtggactgccatgcatggcgttgacgggagcgggggattagggttcgattccggagagggagcctgagaaatagctaccacttctacggagggcagcaggcgcgcaaattgcccaatgtcaaaacaaaacgatgaggcagcgaaaagaaatagagttgtcagtccatttggattgtcatttcaatgggggatatttaaacccatccaatatcgagtaacaattggaggacaagtctggtgccagcacccgcggtaattccagctccaaaagcgtatattaatgctgttgctgttaaagggttcgtagttgaactgtgggctgtgcaggtttgttcctggtcgtcccgtccatgtcggatttggtgacccaggcccttgcagcccgtgaacattcaaagaaacaagaaacacgggagtggttcctttcctgatttacgcatgtcatgcatgcgtcgaagatccagtcgcagcctgaccgcatcacacatcaaggcgttacagcctctccgtctttgctgcacccaagtgtattcgtgtgaccgcgttgagggatctaatggattcggaactttggtcgtttggtctctcatgctgcccaatcccatgcgcttttctccgtgcctctctgtctccccttccgttctatttggacaacgatgtgtactgtaatgcgtgcgccatctgacaacgaatagatcagcagcattcgcacacttgcacatacccagtgaagcttttgtgtctgtcgtattgacaacaccgactgcaacaaggtgtagatagaagttggccttctcgctcgctcgcacgctcttcacgctcctgctttccttgctgtgccttgccaccagatctgccatggcctcgaggctcgtccgtgtgctggccgccgccatgctggttgcagcggccgtgtcggtcgacgctggcgcctctctagacacaatatgtataggctaccatgcgaacaattcaaccgacactgttgacacagtgctcgagaagaatgtgacagtgacacactctgttaacctgctcgaagacagccacaacggaaaactatgtagattaaaaggaatagccccactacaattggggaaatgtaacatcgccggatggctcttgggaaacccagaatgcgacccactgcttccagtgagatcatggtactacattgtagaaacaccaaactctgagaatggaatatgttatccaggagatttcatcgactatgaggagctgagggagcaattgagctcagtgtcatcattcgaaagattcgaaatatttcccaaagaaagctcatggcccaaccacaacacaaacaaaggagtaacggcagcatgctcccatgcgggggaaagcagtttttacagaaatttgctatggctgacggagaaggagggctcatacccaaagctgaaaaattcttatgtgaacaagagagggaaagaagtccttgtactgtggggtattcatcacccgtctaacagtaaggagcaacagaatatctatcagaatgaaaatgcttatgtctctgtagtgacttcaaattataacaggagatttaccccggaaatagcagaaagacccaaagtaagagatcaagctgggaggatgaactattactggaccttgctaaaacccggagacacaataatatttgaggcaaatggaaatctaatagcaccaaggtatgctttcgcactgagtagaggctttgggtccggcatcatcacctcaaacgcatcaatgcatgagtgtaacacgaagtgtcaaacacccctgggagctataaacagcagtctccctttccagaatatacacccagtcacaataggagagtgcccaaaatacgtcaggagtgccaaattgaggatggttacaggactaaggaacattccgtccattcaatccgctagccttaagggtacccaccaccatcaccaccactaggcggccgccctcctcctcctttcttgttcctttcacgtcgccttctcggttgtagctggcagacgacgagtcttacttttacgtgtacttctctatagatgatgtatgatctctctgcatgcgtgttcgtgcatgtgtccgtgtgttgtgtacgcgtgcgtctcgcctcagctctccgcgtgaaagggtttgactgcccatgatgcgtgtgtatatccacgcgcaggcacgcacacacacacacacacacacacacacaggcacacacaggcacacaaacgcatctcaggccgagccgcatacgtctctcgcacggtctcgtttatttgatcatgtagttgagtattaaattgggaagacaaaaacataatagcacgaagagtcgggcacgaaaagcccgatctctctctctctctctcgtgcgcgcaggggcgtgtgggtgcacgacgacgaggacggaggggggaagggaggcataaacggatcgatcccccatcgcacatgcgggtacgagcattatctgctgtgtctggtcctttatcatatcgctacccgcccgccccccgcccccctcccccccccccccccgcggctcctgtcactgtcgttcctgcgactccccacacacccgcgcaacgctcatgtcacgaagagaaaagtagaaggcgtggcgatgcgttgcgcggccccctgtccgctggcatgcagacgtcgagccgtggaacggatggtagcgagagacaacgcggcgatgcaggaaaggagatttactgcaggacgtctacacacgcgcgcacaccactgcgaatggcaccgtgctgaggaaaattgggggggagggcgcacgggggcggggcaggaaacggttggatcagcagcactctcaacttgtgtccgtattgcgaaggagggagaggagcctgcccgtattatgggcgctgaaacgtcggaaccacctatgaatcccacttctgcgtcgcggaggcgtactgcttccgaccacctccgcagctcacgcgcgtcgagctccctccctttccccttctttccgttgtgtgtgtgtgtgtgtgtgtgtcttgtcacgatgcatggccatctctcctccaaccctccacgccttcctctcccccgcccatcaaacgcgctacggccacaaccatttcttcaagtatcacatccaccaccactcttacccacctaccctcttcgactctgacacagccactgacgccctctccgcctctctcgctcgctgcacattgactctccacagccccccctccctcgcacagccagccccacccacccacccacccacccaccgctctacacacctccacagcagccggatcctagtatgaagatttcggtgatccctgagcaggtggcggaaacattggatgctgagaaccatttcattgttcgtgaagtgttcgatgtgcacctatccgaccaaggctttgaactatctaccagaagtgtgagcccctaccggaaggattacatctcggatgatgactctgatgaagactctgcttgctatggcgcattcatcgaccaagagcttgtcgggaagattgaactcaactcaacatggaacgatctagcctctatcgaacacattgttgtgtcgcacacgcaccgaggcaaaggagtcgcgcacagtctcatcgaatttgcgaaaaagtgggcactaagcagacagctccttggcatacgattagagacacaaacgaacaatgtacctgcctgcaatttgtacgcaaaatgtggctttactctcggcggcattgacctgttcacgtataaaactagacctcaagtctcgaacgaaacagcgatgtactggtactggttctcgggagcacaggatgacgcctaactagcctcggagatccactagttctagttctaggggccgaattcagatcctcgtgtgagcgttcgcggaatcggtcgctcgtgtttatgcccgtcttggtgttgtgctcgcaaggcggtgcagcaggataccgtcgccctcctctctccttgcttctctgttcttcaattcgcgatctcacagaggccggctgtgcacgcccttcctcaccctccttttcccacctctcggccaccggtcggctccgttccgtctgccgtcgagaagggacgggcatgtgcagctcctccctttctctcgcgcgcgcatcttctcttgcttgtggcactcacgctcatgcgtcaaggcggccccacgccgagcccctgcgctcccttccctcttgcgcatccgtagcgcggatgccgtcgatgcgcaaggccggcatgaaggagcgcgtgccctcaagagggcacactatcatgccctacgtgggccacgcagcgatgaggccggcttcggcggagatgcgtcacgcacgtgccagatgatgcgctacgccttccttgacttgcgcccccctctcttcctccgtctctcactctctctctctcacacacacacacacacacacacacacacaaagctccggttcgtccggccgtaacgccttttcaactcacggcctctaggaatgaaggagggtagttcgggggagaacgtactggggcgtcagaggtgaaattcttagaccgcaccaagacgaactacagcgaaggcattcttcaaggataccttcctcaatcaagaaccaaagtgtggagatcgaagatgattagagaccattgtagtccacactgcaaacgatgacacccatgaattggggatcttatgggccggcctgcggcagggtttaccctgtgtcagcaccgcgcccgcttttaccaacttacgtatcttttctattcggcctttaccggccacccacgggaatatcctcagcacgttttctgttttttcacgcgaaagctttgaggttacagtctcaggggggagtacgttcgcaagagtgaaacttaaagaaattgacggaatggcaccacaagacgtggagcgtgcggtttaatttgactcaacacggggaactttaccagatccggacaggatgaggattgacagattgagtgttctttctcgattccctgaatggtggtgcatggccgcttttggtcggtggagtgatttgtttggttgattccgtcaacggacgagatccaagctgcccagtagaattcagaattgcccatagaatagcaaactcatcggcgggttttacccaacggtgggccgcattcggtcgaattcttctctgcgggattcctttgtaattgcacaaggtgaaattttgggcaacagcaggtctgtgatgctcctcaatgttctgggcgacacgcgcactacaatgtcagtgagaacaagaaaaacgacttttgtcgaacctacttgatcaaaagagtggggaaaccccggaatcacatagacccacttgggaccgaggattgcaattattggtcgcgcaacgaggaatgtctcgtaggcgcagctcatcaaactgtgccgattacgtccctgccatttgtacacaccgcccgtcgttgtttccgatgatggtgcaatacaggtgatcggacaggcggtgttttatccgcccgaaagttcaccgatatttaaatatcccaatggcgcgccgagcttggcgtaatcatggtcatagctgtttcctgtgtgaaattgttatccgctcacaattccacacaacatacgagccggaagcataaagtgtaaagcctggggtgcctaatgagtgagctaactcacattaattgcgttgcgctcactgcccgctttccagtcgggaaacctgtcgtgccagctgcattaatgaatcggccaacgcgcggggagaggcggtttgcgtattgggcgctcttccgcttcctcgctcactgactcgctgcgctcggtcgttcggctgcggcgagcggtatcagctcactcaaaggcggtaatacggttatccacagaatcaggggataacgcaggaaagaacatgtgagcaaaaggccagcaaaaggccaggaaccgtaaaaaggccgcgttgctggcgtttttccataggctccgcccccctgacgagcatcacaaaaatcgacgctcaagtcagaggtggcgaaacccgacaggactataaagataccaggcgtttccccctggaagctccctcgtgcgctctcctgttccgaccctgccgcttaccggatacctgtccgcctttctcccttcgggaagcgtggcgctttctcatagctcacgctgtaggtatctcagttcggtgtaggtcgttcgctccaagctgggctgtgtgcacgaaccccccgttcagcccgaccgctgcgccttatccggtaactatcgtcttgagtccaacccggtaagacacgacttatcgccactggcagcagccactggtaacaggattagcagagcgaggtatgtaggcggtgctacagagttcttgaagtggtggcctaactacggctacactagaagaacagtatttggtatctgcgctctgctgaagccagttaccttcggaaaaagagttggtagctcttgatccggcaaacaaaccaccgctggtagcggtggtttttttgtttgcaagcagcagattacgcgcagaaaaaaaggatctcaagaagatcctttgatcttttctacggggtctgacgctcagtggaacgaaaactcacgttaagggattttggtcatgagattatcaaaaaggatcttcacctagatccttttaaattaaaaatgaagttttaaatcaatctaaagtatatatgagtaaacttggtctgacagttaccaatgcttaatcagtgaggcacctatctcagcgatctgtctatttcgttcatccatagttgcctgactccccgtcgtgtagataactacgatacgggagggcttaccatctggccccagtgctgcaatgataccgcgagacccacgctcaccggctccagatttatcagcaataaaccagccagccggaagggccgagcgcagaagtggtcctgcaactttatccgcctccatccagtctattaattgttgccgggaagctagagtaagtagttcgccagttaatagtttgcgcaacgttgttgccattgctacaggcatcgtggtgtcacgctcgtcgtttggtatggcttcattcagctccggttcccaacgatcaaggcgagttacatgatcccccatgttgtgcaaaaaagcggttagctccttcggtcctccgatcgttgtcagaagtaagttggccgcagtgttatcactcatggttatggcagcactgcataattctcttactgtcatgccatccgtaagatgcttttctgtgactggtgagtactcaaccaagtcattctgagaatagtgtatgcggcgaccgagttgctcttgcccggcgtcaatacgggataataccgcgccacatagcagaactttaaaagtgctcatcattggaaaacgttcttcggggcgaaaactctcaaggatcttaccgctgttgagatccagttcgatgtaacccactcgtgcacccaactgatcttcagcatcttttactttcaccagcgtttctgggtgagcaaaaacaggaaggcaaaatgccgcaaaaaagggaataagggcgacacggaaatgttgaatactcatactcttcctttttcaatattattgaagcatttatcagggttattgtctcatgagcggatacatatttgaatgtatttagaaaaataaacaaataggggttccgcgcacatttccccgaaaagtgccacctgacgtctaagaaaccattattatcatgacattaacctataaaaataggcgtatcacgaggccctttcgtc

SEQ ID NO: 3 - DNA, 6750 bp, Artificial Sequence
  pLMTB5024
tcgcgcgtttcggtgatgacggtgaaaacctctgacacatgcagctcccggagacggtcacagcttgtctgtaagcggatgccgggagcagacaagcccgtcagggcgcgtcagcgggtgttggcgggtgtcggggctggcttaactatgcggcatcagagcagattgtactgagagtgcaccatatgcggtgtgaaataccgcacagatgcgtaaggagaaaataccgcatcaggcgccattcgccattcaggctgcgcaactgttgggaagggcgatcggtgcgggcctcttcgctattacgccagctggcgaaagggggatgtgctgcaaggcgattaagttgggtaacgccagggttttcccagtcacgacgttgtaaaacgacggccagtgaattggagatcggtacttcgcgaatgcgtcgagatggtaccaaattggataacttggcgaaacgccaagctaatacatgaaccaaccgggtgttctccactccagacggtgggcaaccatcgtcgtgagacgcccagcgaatgaatgacagtaaaaccaatgccttcactggcagtaacacccagcagtgttgactcaattcattccgtgcgaaagccggcttgttccggcgtcttttgacgaacaactgccctatcagctggtgatggccgtgtagtggactgccatgcatggcgttgacgggagcgggggattagggttcgattccggagagggagcctgagaaatagctaccacttctacggagggcagcaggcgcgcaaattgcccaatgtcaaaacaaaacgatgaggcagcgaaaagaaatagagttgtcagtccatttggattgtcatttcaatgggggatatttaaacccatccaatatcgagtaacaattggaggacaagtctggtgccagcacccgcggtaattccagctccaaaagcgtatattaatgctgttgctgttaaagggttcgtagttgaactgtgggctgtgcaggtttgttcctggtcgtcccgtccatgtcggatttggtgacccaggcccttgcagcccgtgaacattcaaagaaacaagaaacacgggagtggttcctttcctgatttacgcatgtcatgcatgcgtcgaagatccagtcgcagcctgaccgcatcacacatcaaggcgttacagcctctccgtctttgctgcacccaagtgtattcgtgtgaccgcgttgagggatctaatggattcggaactttggtcgtttggtctctcatgctgcccaatcccatgcgcttttctccgtgcctctctgtctccccttccgttctatttggacaacgatgtgtactgtaatgcgtgcgccatctgacaacgaatagatcagcagcattcgcacacttgcacatacccagtgaagcttttgtgtctgtcgtattgacaacaccgactgcaacaaggtgtagatagaagttggccttctcgctcgctcgcacgctcttcacgctcctgctttccttgctgtgccttgccaccagatctgccatgatcgcgggcagcgtgcgccgcggcgtgatcctgctgctggtggcggtggcggtggcgacgatggcggcggcggtgagcgcggcgcagatcgtgctgagccagagcccggcgatcctgagcgcgagcccgggcgagaaggtgacgatgacgtgccgcgcgagcagcagcgtgagctacatccactggttccagcagaagccgggcagcagcccgaagccgtggatctacgcgacgagcaacctggcgagcggcgtgccggtgcgcttcagcggcagcggcagcggcacgagctacagcctgacgatcagccgcgtggaggcggaggacgcggcgacgtactactgccagcagtggacgagcaacccgccgacgttcggcggcggcacgaagctggagatcaagcgcacggtggcggcgccgagcgtgttcatcttcccgccgagcgacgagcagctgaagagcggcacggcgagcgtggtgtgcctgctgaacaacttctacccgcgcgaggcgaaggtgcagtggaaggtggacaacgcgctgcagagcggcaacagccaggagagcgtgacggagcaggacagcaaggacagcacgtacagcctgagcagcacgctgacgctgagcaaggcggactacgagaagcacaaggtgtacgcgtgcgaggtgacgcaccagggcctgagcagcccggtgacgaagagcttcaaccgcggcgagtgctgatcgagggaggaggaggaggcgcgtagcattgcgtgcgggttatgtgtgcgtgcgtgtgtgtgtgcggtgcgcgcctttcctcttttttttctccctctcgtcggttttttttttctgaggagacggggcgaagacgcgagcggggggcggcgtttgtgtgtgtgtgtgcgcgtgtcgggggcagcggtgttggcggaacggccaacgccctgccccctccccgccctgcgacgtttctgcgcacccgttctctccttcctgcgtgcgtgtctgcgcgcatgcacatctgtccgcgtgtgccgcagcgctggtatttttgtgagggcagagccctgcctccccgcctctctgccgttggcaggtgaagcgaaaacgaagcgagagggcagtctgcatgtgtgtgcgagggcatgcggagcccccctccccccgccccctgccgtgctgcaccgctattgtggcgtcttctctcgttgtgcgcaagtgtggctgcaccacggccgcctcatgtgcgtgtgtgcgcatgtacacacacacacacacacacacacacacacgggcaggcgcacgctcctctctcttcagggagcgccgccccgctggtgtcattggacgagcatccgccgcgcatctcttcacccctcacccctcatccctctcccctctccccgcacacacacgcagtccttcgctttcactcttcgaacaaacacctcaaccatcttatcacctttctctcttccttgtcaaccatgcgtgaggccatgatcgcgggcagcgtgcgccgcggcgtgatcctgctgctggtggcggtggcggtggcgacgatggcggcggcggtgagcgcggcgcaggtgcagctgcagcagccgggcgcggagctggtgaagccgggcgcgagcgtgaagatgagctgcaaggcgagcggctacacgttcacgagctacaacatgcactgggtgaagcagacgccgggccgcggcctggagtggatcggcgcgatctacccgggcaacggcgacacgagctacaaccagaagttcaagggcaaggcgacgctgacggcggacaagagcagcagcacggcgtacatgcagctgagcagcctgacgagcgaggacagcgcggtgtactactgcgcgcgcagcacgtactacggcggcgactggtacttcaacgtgtggggcgcgggcacgacggtgacggtgagcgcggcgagcacgaagggcccgagcgtgttcccgctggcgccgagcagcaagagcacgagcggcggcacggcggcgctgggctgcctggtgaaggactacttcccggagccggtgacggtgagctggaacagcggcgcgctgacgagcggcgtgcacacgttcccggcggtgctgcagagcagcggcctgtacagcctgagcagcgtggtgacggtgccgagcagcagcctgggcacgcagacgtacatctgcaacgtgaaccacaagccgagcaacacgaaggtggacaagaaggcggagccgaagagctgcgacaagacgcacacgtgcccgccgtgcccggcgccggagctgctgggcggcccgagcgtgttcctgttcccgccgaagccgaaggacacgctgatgatcagccgcacgccggaggtgacgtgcgtggtggtggacgtgagccacgaggacccggaggtgaagttcaactggtacgtggacggcgtggaggtgcacaacgcgaagacgaagccgcgcgaggagcagtacaacagcacgtaccgcgtggtgagcgtgctgacggtgctgcaccaggactggctgaacggcaaggagtacaagtgcaaggtgagcaacaaggcgctgccggcgccgatcgagaagacgatcagcaaggcgaagggccagccgcgcgagccgcaggtgtacacgctgccgccgagccgcgacgagctgacgaagaaccaggtgagcctgacgtgcctggtgaagggcttctacccgagcgacatcgcggtggagtgggagagcaacggccagccggagaacaactacaagacgacgccgccggtgctggacagcgacggcagcttcttcctgtacagcaagctgacggtggacaagagccgctggcagcagggcaacgtgttcagctgcagcgtgatgcacgaggcgctgcacaaccactacacgcagaagagcctgagcctgagcccgggcaagtgggtaccatcggatgccgggaccgacgagtgcagaggcgtgcaagcgagcttggcgtaatcatggtcatagctgtttcctgtgtgaaattgttatccgctcacaattccacacaacatacgagccggaagcataaagtgtaaagcctggggtgcctaatgagtgagctaactcacattaattgcgttgcgctcactgcccgctttccagtcgggaaacctgtcgtgccagctgcattaatgaatcggccaacgcgcggggagaggcggtttgcgtattgggcgctcttccgcttcctcgctcactgactcgctgcgctcggtcgttcggctgcggcgagcggtatcagctcactcaaaggcggtaatacggttatccacagaatcaggggataacgcaggaaagaacatgtgagcaaaaggccagcaaaaggccaggaaccgtaaaaaggccgcgttgctggcgtttttccataggctccgcccccctgacgagcatcacaaaaatcgacgctcaagtcagaggtggcgaaacccgacaggactataaagataccaggcgtttccccctggaagctccctcgtgcgctctcctgttccgaccctgccgcttaccggatacctgtccgcctttctcccttcgggaagcgtggcgctttctcatagctcacgctgtaggtatctcagttcggtgtaggtcgttcgctccaagctgggctgtgtgcacgaaccccccgttcagcccgaccgctgcgccttatccggtaactatcgtcttgagtccaacccggtaagacacgacttatcgccactggcagcagccactggtaacaggattagcagagcgaggtatgtaggcggtgctacagagttcttgaagtggtggcctaactacggctacactagaagaacagtatttggtatctgcgctctgctgaagccagttaccttcggaaaaagagttggtagctcttgatccggcaaacaaaccaccgctggtagcggtggtttttttgtttgcaagcagcagattacgcgcagaaaaaaaggatctcaagaagatcctttgatcttttctacggggtctgacgctcagtggaacgaaaactcacgttaagggattttggtcatgagattatcaaaaaggatcttcacctagatccttttaaattaaaaatgaagttttaaatcaatctaaagtatatatgagtaaacttggtctgacagttaccaatgcttaatcagtgaggcacctatctcagcgatctgtctatttcgttcatccatagttgcctgactccccgtcgtgtagataactacgatacgggagggcttaccatctggccccagtgctgcaatgataccgcgagacccacgctcaccggctccagatttatcagcaataaaccagccagccggaagggccgagcgcagaagtggtcctgcaactttatccgcctccatccagtctattaattgttgccgggaagctagagtaagtagttcgccagttaatagtttgcgcaacgttgttgccattgctacaggcatcgtggtgtcacgctcgtcgtttggtatggcttcattcagctccggttcccaacgatcaaggcgagttacatgatcccccatgttgtgcaaaaaagcggttagctccttcggtcctccgatcgttgtcagaagtaagttggccgcagtgttatcactcatggttatggcagcactgcataattctcttactgtcatgccatccgtaagatgcttttctgtgactggtgagtactcaaccaagtcattctgagaatagtgtatgcggcgaccgagttgctcttgcccggcgtcaatacgggataataccgcgccacatagcagaactttaaaagtgctcatcattggaaaacgttcttcggggcgaaaactctcaaggatcttaccgctgttgagatccagttcgatgtaacccactcgtgcacccaactgatcttcagcatcttttactttcaccagcgtttctgggtgagcaaaaacaggaaggcaaaatgccgcaaaaaagggaataagggcgacacggaaatgttgaatactcatactcttcctttttcaatattattgaagcatttatcagggttattgtctcatgagcggatacatatttgaatgtatttagaaaaataaacaaataggggttccgcgcacatttccccgaaaagtgccacctgacgtctaagaaaccattattatcatgacattaacctataaaaataggcgtatcacgaggccctttcgtc

SEQ ID NO: 4 - DNA, 6559 bp, Artificial Sequence
  pLMTB5025
tcgcgcgtttcggtgatgacggtgaaaacctctgacacatgcagctcccggagacggtcacagcttgtctgtaagcggatgccgggagcagacaagcccgtcagggcgcgtcagcgggtgttggcgggtgtcggggctggcttaactatgcggcatcagagcagattgtactgagagtgcaccatatgcggtgtgaaataccgcacagatgcgtaaggagaaaataccgcatcaggcgccattcgccattcaggctgcgcaactgttgggaagggcgatcggtgcgggcctcttcgctattacgccagctggcgaaagggggatgtgctgcaaggcgattaagttgggtaacgccagggttttcccagtcacgacgttgtaaaacgacggccagtgaattggagatcggtacttcgcgaatgcgtcgagatggtaccagcctgacgtgcctggtgaagggcttctacccgagcgacatcgcggtggagtgggagagcaacggccagccggagaacaactacaagacgacgccgccggtgctggacagcgacggcagcttcttcctgtacagcaagctgacggtggacaagagccgctggcagcagggcaacgtgttcagctgcagcgtgatgcacgaggcgctgcacaaccactacacgcagaagagcctgagcctgagcccgggcaagtgacctcctcctcctttcttgttcctttcacgtcgccttctcggttgtagctggcagacgacgagtcttacttttacgtgtacttctctatagatgatgtatgatctctctgcatgcgtgttcgtgcatgtgtccgtgtgttgtgtacgcgtgcgtctcgcctcagctctccgcgtgaaagggtttgactgcccatgatgcgtgtgtatatccacgcgcaggcacgcacacacacacacacacacacacacacaggcacacacaggcacacaaacgcatctcaggccgagccgcatacgtctctcgcacggtctcgtttatttgatcatgtagttgagtattaaattgggaagacaaaaacataatagcacgaagagtcgggcacgaaaagcccgatctctctctctctctctcgtgcgcgcaggggcgtgtgggtgcacgacgacgaggacggaggggggaagggaggcataaacggatcgatcccccatcgcacatgcgggtacgagcattatctgctgtgtctggtcctttatcatatcgctacccgcccgccccccgcccccctcccccccccccccccgcggctcctgtcactgtcgttcctgcgactccccacacacccgcgcaacgctcatgtcacgaagagaaaagtagaaggcgtggcgatgcgttgcgcggccccctgtccgctggcatgcagacgtcgagccgtggaacggatggtagcgagagacaacgcggcgatgcaggaaaggagatttactgcaggacgtctacacacgcgcgcacaccactgcgaatggcaccgtgctgaggaaaattgggggggagggcgcacgggggcggggcaggaaacggttggatcagcagcactctcaacttgtgtccgtattgcgaaggagggagaggagcctgcccgtattatgggcgctgaaacgtcggaaccacctatgaatcccacttctgcgtcgcggaggcgtactgcttccgaccacctccgcagctcacgcgcgtcgagctccctccctttccccttctttccgttgtgtgtgtgtgtgtgtgtgtgtcttgtcacgatgcatggccatctctcctccaaccctccacgccttcctctcccccgcccatcaaacgcgctacggccacaaccatttcttcaagtatcacatccaccaccactcttacccacctaccctcttcgactctgacacagccactgacgccctctccgcctctctcgctcgctgcacattgactctccacagccccccctccctcgcacagccagccccacccacccacccacccacccaccgctctacacacctccacagcagccggatcctagtatgaagatttcggtgatccctgagcaggtggcggaaacattggatgctgagaaccatttcattgttcgtgaagtgttcgatgtgcacctatccgaccaaggctttgaactatctaccagaagtgtgagcccctaccggaaggattacatctcggatgatgactctgatgaagactctgcttgctatggcgcattcatcgaccaagagcttgtcgggaagattgaactcaactcaacatggaacgatctagcctctatcgaacacattgttgtgtcgcacacgcaccgaggcaaaggagtcgcgcacagtctcatcgaatttgcgaaaaagtgggcactaagcagacagctccttggcatacgattagagacacaaacgaacaatgtacctgcctgcaatttgtacgcaaaatgtggctttactctcggcggcattgacctgttcacgtataaaactagacctcaagtctcgaacgaaacagcgatgtactggtactggttctcgggagcacaggatgacgcctaactagcctcggagatccactagttctagttctaggggccgaattcagatcctcgtgtgagcgttcgcggaatcggtcgctcgtgtttatgcccgtcttggtgttgtgctcgcaaggcggtgcagcaggataccgtcgccctcctctctccttgcttctctgttcttcaattcgcgatctcacagaggccggctgtgcacgcccttcctcaccctccttttcccacctctcggccaccggtcggctccgttccgtctgccgtcgagaagggacgggcatgtgcagctcctccctttctctcgcgcgcgcatcttctcttgcttgtggcactcacgctcatgcgtcaaggcggccccacgccgagcccctgcgctcccttccctcttgcgcatccgtagcgcggatgccgtcgatgcgcaaggccggcatgaaggagcgcgtgccctcaagagggcacactatcatgccctacgtgggccacgcagcgatgaggccggcttcggcggagatgcgtcacgcacgtgccagatgatgcgctacgccttccttgacttgcgcccccctctcttcctccgtctctcactctctctctctcacacacacacacacacacacacacacacaaagctccggttcgtccggccgtaacgccttttcaactcacggcctctaggaatgaaggagggtagttcgggggagaacgtactggggcgtcagaggtgaaattcttagaccgcaccaagacgaactacagcgaaggcattcttcaaggataccttcctcaatcaagaaccaaagtgtggagatcgaagatgattagagaccattgtagtccacactgcaaacgatgacacccatgaattggggatcttatgggccggcctgcggcagggtttaccctgtgtcagcaccgcgcccgcttttaccaacttacgtatcttttctattcggcctttaccggccacccacgggaatatcctcagcacgttttctgttttttcacgcgaaagctttgaggttacagtctcaggggggagtacgttcgcaagagtgaaacttaaagaaattgacggaatggcaccacaagacgtggagcgtgcggtttaatttgactcaacacggggaactttaccagatccggacaggatgaggattgacagattgagtgttctttctcgattccctgaatggtggtgcatggccgcttttggtcggtggagtgatttgtttggttgattccgtcaacggacgagatccaagctgcccagtagaattcagaattgcccatagaatagcaaactcatcggcgggttttacccaacggtgggccgcattcggtcgaattcttctctgcgggattcctttgtaattgcacaaggtgaaattttgggcaacagcaggtctgtgatgctcctcaatgttctgggcgacacgcgcactacaatgtcagtgagaacaagaaaaacgacttttgtcgaacctacttgatcaaaagagtggggaaaccccggaatcacatagacccacttgggaccgaggattgcaattattggtcgcgcaacgaggaatgtctcgtaggcgcagctcatcaaactgtgccgattacgtccctgccatttgtacacaccgcccgtcgttgtttccgatgatggtgcaatacaggtgatcggacaggcggtgttttatccgcccgaaagttcaccgatatttggtaccatcggatgccgggaccgacgagtgcagaggcgtgcaagcgagcttggcgtaatcatggtcatagctgtttcctgtgtgaaattgttatccgctcacaattccacacaacatacgagccggaagcataaagtgtaaagcctggggtgcctaatgagtgagctaactcacattaattgcgttgcgctcactgcccgctttccagtcgggaaacctgtcgtgccagctgcattaatgaatcggccaacgcgcggggagaggcggtttgcgtattgggcgctcttccgcttcctcgctcactgactcgctgcgctcggtcgttcggctgcggcgagcggtatcagctcactcaaaggcggtaatacggttatccacagaatcaggggataacgcaggaaagaacatgtgagcaaaaggccagcaaaaggccaggaaccgtaaaaaggccgcgttgctggcgtttttccataggctccgcccccctgacgagcatcacaaaaatcgacgctcaagtcagaggtggcgaaacccgacaggactataaagataccaggcgtttccccctggaagctccctcgtgcgctctcctgttccgaccctgccgcttaccggatacctgtccgcctttctcccttcgggaagcgtggcgctttctcatagctcacgctgtaggtatctcagttcggtgtaggtcgttcgctccaagctgggctgtgtgcacgaaccccccgttcagcccgaccgctgcgccttatccggtaactatcgtcttgagtccaacccggtaagacacgacttatcgccactggcagcagccactggtaacaggattagcagagcgaggtatgtaggcggtgctacagagttcttgaagtggtggcctaactacggctacactagaagaacagtatttggtatctgcgctctgctgaagccagttaccttcggaaaaagagttggtagctcttgatccggcaaacaaaccaccgctggtagcggtggtttttttgtttgcaagcagcagattacgcgcagaaaaaaaggatctcaagaagatcctttgatcttttctacggggtctgacgctcagtggaacgaaaactcacgttaagggattttggtcatgagattatcaaaaaggatcttcacctagatccttttaaattaaaaatgaagttttaaatcaatctaaagtatatatgagtaaacttggtctgacagttaccaatgcttaatcagtgaggcacctatctcagcgatctgtctatttcgttcatccatagttgcctgactccccgtcgtgtagataactacgatacgggagggcttaccatctggccccagtgctgcaatgataccgcgagacccacgctcaccggctccagatttatcagcaataaaccagccagccggaagggccgagcgcagaagtggtcctgcaactttatccgcctccatccagtctattaattgttgccgggaagctagagtaagtagttcgccagttaatagtttgcgcaacgttgttgccattgctacaggcatcgtggtgtcacgctcgtcgtttggtatggcttcattcagctccggttcccaacgatcaaggcgagttacatgatcccccatgttgtgcaaaaaagcggttagctccttcggtcctccgatcgttgtcagaagtaagttggccgcagtgttatcactcatggttatggcagcactgcataattctcttactgtcatgccatccgtaagatgcttttctgtgactggtgagtactcaaccaagtcattctgagaatagtgtatgcggcgaccgagttgctcttgcccggcgtcaatacgggataataccgcgccacatagcagaactttaaaagtgctcatcattggaaaacgttcttcggggcgaaaactctcaaggatcttaccgctgttgagatccagttcgatgtaacccactcgtgcacccaactgatcttcagcatcttttactttcaccagcgtttctgggtgagcaaaaacaggaaggcaaaatgccgcaaaaaagggaataagggcgacacggaaatgttgaatactcatactcttcctttttcaatattattgaagcatttatcagggttattgtctcatgagcggatacatatttgaatgtatttagaaaaataaacaaataggggttccgcgcacatttccccgaaaagtgccacctgacgtctaagaaaccattattatcatgacattaacctataaaaataggcgtatcacgaggccctttcgtc

SEQ ID NO: 5 - DNA, 10333 bp, Artificial Sequence
  pLMTB5026
tcgcgcgtttcggtgatgacggtgaaaacctctgacacatgcagctcccggagacggtcacagcttgtctgtaagcggatgccgggagcagacaagcccgtcagggcgcgtcagcgggtgttggcgggtgtcggggctggcttaactatgcggcatcagagcagattgtactgagagtgcaccatatgcggtgtgaaataccgcacagatgcgtaaggagaaaataccgcatcaggcgccattcgccattcaggctgcgcaactgttgggaagggcgatcggtgcgggcctcttcgctattacgccagctggcgaaagggggatgtgctgcaaggcgattaagttgggtaacgccagggttttcccagtcacgacgttgtaaaacgacggccagtgaattggagatcggtacttcgcgaatgcgtcgagatggtaccaaattggataacttggcgaaacgccaagctaatacatgaaccaaccgggtgttctccactccagacggtgggcaaccatcgtcgtgagacgcccagcgaatgaatgacagtaaaaccaatgccttcactggcagtaacacccagcagtgttgactcaattcattccgtgcgaaagccggcttgttccggcgtcttttgacgaacaactgccctatcagctggtgatggccgtgtagtggactgccatgcatggcgttgacgggagcgggggattagggttcgattccggagagggagcctgagaaatagctaccacttctacggagggcagcaggcgcgcaaattgcccaatgtcaaaacaaaacgatgaggcagcgaaaagaaatagagttgtcagtccatttggattgtcatttcaatgggggatatttaaacccatccaatatcgagtaacaattggaggacaagtctggtgccagcacccgcggtaattccagctccaaaagcgtatattaatgctgttgctgttaaagggttcgtagttgaactgtgggctgtgcaggtttgttcctggtcgtcccgtccatgtcggatttggtgacccaggcccttgcagcccgtgaacattcaaagaaacaagaaacacgggagtggttcctttcctgatttacgcatgtcatgcatgcgtcgaagatccagtcgcagcctgaccgcatcacacatcaaggcgttacagcctctccgtctttgctgcacccaagtgtattcgtgtgaccgcgttgagggatctaatggattcggaactttggtcgtttggtctctcatgctgcccaatcccatgcgcttttctccgtgcctctctgtctccccttccgttctatttggacaacgatgtgtactgtaatgcgtgcgccatctgacaacgaatagatcagcagcattcgcacacttgcacatacccagtgaagcttttgtgtctgtcgtattgacaacaccgactgcaacaaggtgtagatagaagttggccttctcgctcgctcgcacgctcttcacgctcctgctttccttgctgtgccttgccaccagatctgccatgatcgcgggcagcgtgcgccgcggcgtgatcctgctgctggtggcggtggcggtggcgacgatggcggcggcggtgagcgcggcgcagatcgtgctgagccagagcccggcgatcctgagcgcgagcccgggcgagaaggtgacgatgacgtgccgcgcgagcagcagcgtgagctacatccactggttccagcagaagccgggcagcagcccgaagccgtggatctacgcgacgagcaacctggcgagcggcgtgccggtgcgcttcagcggcagcggcagcggcacgagctacagcctgacgatcagccgcgtggaggcggaggacgcggcgacgtactactgccagcagtggacgagcaacccgccgacgttcggcggcggcacgaagctggagatcaagcgcacggtggcggcgccgagcgtgttcatcttcccgccgagcgacgagcagctgaagagcggcacggcgagcgtggtgtgcctgctgaacaacttctacccgcgcgaggcgaaggtgcagtggaaggtggacaacgcgctgcagagcggcaacagccaggagagcgtgacggagcaggacagcaaggacagcacgtacagcctgagcagcacgctgacgctgagcaaggcggactacgagaagcacaaggtgtacgcgtgcgaggtgacgcaccagggcctgagcagcccggtgacgaagagcttcaaccgcggcgagtgctgatcgagggaggaggaggaggcgcgtagcattgcgtgcgggttatgtgtgcgtgcgtgtgtgtgtgcggtgcgcgcctttcctcttttttttctccctctcgtcggttttttttttctgaggagacggggcgaagacgcgagcggggggcggcgtttgtgtgtgtgtgtgcgcgtgtcgggggcagcggtgttggcggaacggccaacgccctgccccctccccgccctgcgacgtttctgcgcacccgttctctccttcctgcgtgcgtgtctgcgcgcatgcacatctgtccgcgtgtgccgcagcgctggtatttttgtgagggcagagccctgcctccccgcctctctgccgttggcaggtgaagcgaaaacgaagcgagagggcagtctgcatgtgtgtgcgagggcatgcggagcccccctccccccgccccctgccgtgctgcaccgctattgtggcgtcttctctcgttgtgcgcaagtgtggctgcaccacggccgcctcatgtgcgtgtgtgcgcatgtacacacacacacacacacacacacacacacgggcaggcgcacgctcctctctcttcagggagcgccgccccgctggtgtcattggacgagcatccgccgcgcatctcttcacccctcacccctcatccctctcccctctccccgcacacacacgcagtccttcgctttcactcttcgaacaaacacctcaaccatcttatcacctttctctcttccttgtcaaccatgcgtgaggccatgatcgcgggcagcgtgcgccgcggcgtgatcctgctgctggtggcggtggcggtggcgacgatggcggcggcggtgagcgcggcgcaggtgcagctgcagcagccgggcgcggagctggtgaagccgggcgcgagcgtgaagatgagctgcaaggcgagcggctacacgttcacgagctacaacatgcactgggtgaagcagacgccgggccgcggcctggagtggatcggcgcgatctacccgggcaacggcgacacgagctacaaccagaagttcaagggcaaggcgacgctgacggcggacaagagcagcagcacggcgtacatgcagctgagcagcctgacgagcgaggacagcgcggtgtactactgcgcgcgcagcacgtactacggcggcgactggtacttcaacgtgtggggcgcgggcacgacggtgacggtgagcgcggcgagcacgaagggcccgagcgtgttcccgctggcgccgagcagcaagagcacgagcggcggcacggcggcgctgggctgcctggtgaaggactacttcccggagccggtgacggtgagctggaacagcggcgcgctgacgagcggcgtgcacacgttcccggcggtgctgcagagcagcggcctgtacagcctgagcagcgtggtgacggtgccgagcagcagcctgggcacgcagacgtacatctgcaacgtgaaccacaagccgagcaacacgaaggtggacaagaaggcggagccgaagagctgcgacaagacgcacacgtgcccgccgtgcccggcgccggagctgctgggcggcccgagcgtgttcctgttcccgccgaagccgaaggacacgctgatgatcagccgcacgccggaggtgacgtgcgtggtggtggacgtgagccacgaggacccggaggtgaagttcaactggtacgtggacggcgtggaggtgcacaacgcgaagacgaagccgcgcgaggagcagtacaacagcacgtaccgcgtggtgagcgtgctgacggtgctgcaccaggactggctgaacggcaaggagtacaagtgcaaggtgagcaacaaggcgctgccggcgccgatcgagaagacgatcagcaaggcgaagggccagccgcgcgagccgcaggtgtacacgctgccgccgagccgcgacgagctgacgaagaaccaggtgagcctgacgtgcctggtgaagggcttctacccgagcgacatcgcggtggagtgggagagcaacggccagccggagaacaactacaagacgacgccgccggtgctggacagcgacggcagcttcttcctgtacagcaagctgacggtggacaagagccgctggcagcagggcaacgtgttcagctgcagcgtgatgcacgaggcgctgcacaaccactacacgcagaagagcctgagcctgagcccgggcaagtgacctcctcctcctttcttgttcctttcacgtcgccttctcggttgtagctggcagacgacgagtcttacttttacgtgtacttctctatagatgatgtatgatctctctgcatgcgtgttcgtgcatgtgtccgtgtgttgtgtacgcgtgcgtctcgcctcagctctccgcgtgaaagggtttgactgcccatgatgcgtgtgtatatccacgcgcaggcacgcacacacacacacacacacacacacacaggcacacacaggcacacaaacgcatctcaggccgagccgcatacgtctctcgcacggtctcgtttatttgatcatgtagttgagtattaaattgggaagacaaaaacataatagcacgaagagtcgggcacgaaaagcccgatctctctctctctctctcgtgcgcgcaggggcgtgtgggtgcacgacgacgaggacggaggggggaagggaggcataaacggatcgatcccccatcgcacatgcgggtacgagcattatctgctgtgtctggtcctttatcatatcgctacccgcccgccccccgcccccctcccccccccccccccgcggctcctgtcactgtcgttcctgcgactccccacacacccgcgcaacgctcatgtcacgaagagaaaagtagaaggcgtggcgatgcgttgcgcggccccctgtccgctggcatgcagacgtcgagccgtggaacggatggtagcgagagacaacgcggcgatgcaggaaaggagatttactgcaggacgtctacacacgcgcgcacaccactgcgaatggcaccgtgctgaggaaaattgggggggagggcgcacgggggcggggcaggaaacggttggatcagcagcactctcaacttgtgtccgtattgcgaaggagggagaggagcctgcccgtattatgggcgctgaaacgtcggaaccacctatgaatcccacttctgcgtcgcggaggcgtactgcttccgaccacctccgcagctcacgcgcgtcgagctccctccctttccccttctttccgttgtgtgtgtgtgtgtgtgtgtgtcttgtcacgatgcatggccatctctcctccaaccctccacgccttcctctcccccgcccatcaaacgcgctacggccacaaccatttcttcaagtatcacatccaccaccactcttacccacctaccctcttcgactctgacacagccactgacgccctctccgcctctctcgctcgctgcacattgactctccacagccccccctccctcgcacagccagccccacccacccacccacccacccaccgctctacacacctccacagcagccggatcctagtatgaagatttcggtgatccctgagcaggtggcggaaacattggatgctgagaaccatttcattgttcgtgaagtgttcgatgtgcacctatccgaccaaggctttgaactatctaccagaagtgtgagcccctaccggaaggattacatctcggatgatgactctgatgaagactctgcttgctatggcgcattcatcgaccaagagcttgtcgggaagattgaactcaactcaacatggaacgatctagcctctatcgaacacattgttgtgtcgcacacgcaccgaggcaaaggagtcgcgcacagtctcatcgaatttgcgaaaaagtgggcactaagcagacagctccttggcatacgattagagacacaaacgaacaatgtacctgcctgcaatttgtacgcaaaatgtggctttactctcggcggcattgacctgttcacgtataaaactagacctcaagtctcgaacgaaacagcgatgtactggtactggttctcgggagcacaggatgacgcctaactagcctcggagatccactagttctagttctaggggccgaattcagatcctcgtgtgagcgttcgcggaatcggtcgctcgtgtttatgcccgtcttggtgttgtgctcgcaaggcggtgcagcaggataccgtcgccctcctctctccttgcttctctgttcttcaattcgcgatctcacagaggccggctgtgcacgcccttcctcaccctccttttcccacctctcggccaccggtcggctccgttccgtctgccgtcgagaagggacgggcatgtgcagctcctccctttctctcgcgcgcgcatcttctcttgcttgtggcactcacgctcatgcgtcaaggcggccccacgccgagcccctgcgctcccttccctcttgcgcatccgtagcgcggatgccgtcgatgcgcaaggccggcatgaaggagcgcgtgccctcaagagggcacactatcatgccctacgtgggccacgcagcgatgaggccggcttcggcggagatgcgtcacgcacgtgccagatgatgcgctacgccttccttgacttgcgcccccctctcttcctccgtctctcactctctctctctcacacacacacacacacacacacacacacaaagctccggttcgtccggccgtaacgccttttcaactcacggcctctaggaatgaaggagggtagttcgggggagaacgtactggggcgtcagaggtgaaattcttagaccgcaccaagacgaactacagcgaaggcattcttcaaggataccttcctcaatcaagaaccaaagtgtggagatcgaagatgattagagaccattgtagtccacactgcaaacgatgacacccatgaattggggatcttatgggccggcctgcggcagggtttaccctgtgtcagcaccgcgcccgcttttaccaacttacgtatcttttctattcggcctttaccggccacccacgggaatatcctcagcacgttttctgttttttcacgcgaaagctttgaggttacagtctcaggggggagtacgttcgcaagagtgaaacttaaagaaattgacggaatggcaccacaagacgtggagcgtgcggtttaatttgactcaacacggggaactttaccagatccggacaggatgaggattgacagattgagtgttctttctcgattccctgaatggtggtgcatggccgcttttggtcggtggagtgatttgtttggttgattccgtcaacggacgagatccaagctgcccagtagaattcagaattgcccatagaatagcaaactcatcggcgggttttacccaacggtgggccgcattcggtcgaattcttctctgcgggattcctttgtaattgcacaaggtgaaattttgggcaacagcaggtctgtgatgctcctcaatgttctgggcgacacgcgcactacaatgtcagtgagaacaagaaaaacgacttttgtcgaacctacttgatcaaaagagtggggaaaccccggaatcacatagacccacttgggaccgaggattgcaattattggtcgcgcaacgaggaatgtctcgtaggcgcagctcatcaaactgtgccgattacgtccctgccatttgtacacaccgcccgtcgttgtttccgatgatggtgcaatacaggtgatcggacaggcggtgttttatccgcccgaaagttcaccgatatttggtaccatcggatgccgggaccgacgagtgcagaggcgtgcaagcgagcttggcgtaatcatggtcatagctgtttcctgtgtgaaattgttatccgctcacaattccacacaacatacgagccggaagcataaagtgtaaagcctggggtgcctaatgagtgagctaactcacattaattgcgttgcgctcactgcccgctttccagtcgggaaacctgtcgtgccagctgcattaatgaatcggccaacgcgcggggagaggcggtttgcgtattgggcgctcttccgcttcctcgctcactgactcgctgcgctcggtcgttcggctgcggcgagcggtatcagctcactcaaaggcggtaatacggttatccacagaatcaggggataacgcaggaaagaacatgtgagcaaaaggccagcaaaaggccaggaaccgtaaaaaggccgcgttgctggcgtttttccataggctccgcccccctgacgagcatcacaaaaatcgacgctcaagtcagaggtggcgaaacccgacaggactataaagataccaggcgtttccccctggaagctccctcgtgcgctctcctgttccgaccctgccgcttaccggatacctgtccgcctttctcccttcgggaagcgtggcgctttctcatagctcacgctgtaggtatctcagttcggtgtaggtcgttcgctccaagctgggctgtgtgcacgaaccccccgttcagcccgaccgctgcgccttatccggtaactatcgtcttgagtccaacccggtaagacacgacttatcgccactggcagcagccactggtaacaggattagcagagcgaggtatgtaggcggtgctacagagttcttgaagtggtggcctaactacggctacactagaagaacagtatttggtatctgcgctctgctgaagccagttaccttcggaaaaagagttggtagctcttgatccggcaaacaaaccaccgctggtagcggtggtttttttgtttgcaagcagcagattacgcgcagaaaaaaaggatctcaagaagatcctttgatcttttctacggggtctgacgctcagtggaacgaaaactcacgttaagggattttggtcatgagattatcaaaaaggatcttcacctagatccttttaaattaaaaatgaagttttaaatcaatctaaagtatatatgagtaaacttggtctgacagttaccaatgcttaatcagtgaggcacctatctcagcgatctgtctatttcgttcatccatagttgcctgactccccgtcgtgtagataactacgatacgggagggcttaccatctggccccagtgctgcaatgataccgcgagacccacgctcaccggctccagatttatcagcaataaaccagccagccggaagggccgagcgcagaagtggtcctgcaactttatccgcctccatccagtctattaattgttgccgggaagctagagtaagtagttcgccagttaatagtttgcgcaacgttgttgccattgctacaggcatcgtggtgtcacgctcgtcgtttggtatggcttcattcagctccggttcccaacgatcaaggcgagttacatgatcccccatgttgtgcaaaaaagcggttagctccttcggtcctccgatcgttgtcagaagtaagttggccgcagtgttatcactcatggttatggcagcactgcataattctcttactgtcatgccatccgtaagatgcttttctgtgactggtgagtactcaaccaagtcattctgagaatagtgtatgcggcgaccgagttgctcttgcccggcgtcaatacgggataataccgcgccacatagcagaactttaaaagtgctcatcattggaaaacgttcttcggggcgaaaactctcaaggatcttaccgctgttgagatccagttcgatgtaacccactcgtgcacccaactgatcttcagcatcttttactttcaccagcgtttctgggtgagcaaaaacaggaaggcaaaatgccgcaaaaaagggaataagggcgacacggaaatgttgaatactcatactcttcctttttcaatattattgaagcatttatcagggttattgtctcatgagcggatacatatttgaatgtatttagaaaaataaacaaataggggttccgcgcacatttccccgaaaagtgccacctgacgtctaagaaaccattattatcatgacattaacctataaaaataggcgtatcacgaggccctttcgtc

SEQ ID NO: 6 - DNA, 22942 bp, Artificial Sequence
  pLMTB6411
aattggcgcgcccgggactagtcttgggaattcagcgggttcgtgcgatccgtctgcatgatggtgatagccgtcagcatgattttcgtgtcgtcgaacttggtgaagggcattctcggcggcgatcacgacgccggccctgcggagccttcgccgcgtgcgcgattcatggcggccgtggaggccaaggatttcgcgcgagtgcaagagctgatcgaggcgcgtggagccaagtcggcggctgattatgtccttgcgcagctcgccgtggccgaaggtctggaccgcaagcctggtgcgcgcgtcgtggtcgggaaagcggcgggcagcatggcaatgccgcctgcggcgctgggttttacgccaaggggagaagcggcatacgccatcgagcggtcagcctatggtgagccgaggtccagcattgcgaagcagtaccagcaggaatggaaccggaaggcggcgacctggtgggcgatggccggtgtggccggcatcatcggcgcgatcctggcggcggcggcaaccggctttgttgggctggcagtgtcgatccgcaaccgagtgaagcgcgtgcgcgacctgttggtgatggagccgggtgcagagccataagcggcaagagacgaaagcccggtttccgggcttttgttttgttacgccaaggacgagttttagcggctaaaggtgttgacgtgcgagaaatgtttagctaaacttctctcatgtgctggcggctgtcaccgctatgttcaaccaaggcgcggagcaaattatgggtgttatccatgaagaaacggcttaccgaaagccagttccaggaggcgatccaggggctggaagtggggcagcagaccatcgagatagcgcggggcgtcttagtcgatgggaagccacaggcgacgttcgcaacgtcgctgggactgaccaggggcgcagtgtcgcaagcggtgcatcgcgtgtgggccgcgttcgaggacaagaacttgcccgaggggtacgcgcgggtaacggcggttctgccggaacatcaggcgtacatcgtccggaagtgggaagcggacgccaagaaaaaacaggaaaccaaacgatgaaaactttggtcacggccaaccagaaaggcggcgtcggcaagacttcgacccttgtgcatcttgccttcgactttttcgagcgcggcttgcgggttgccgtgatcgacctggacccccagggcaatgcgtcctacacgctcaaggactttgctaccggcctgcatgcaagcaagctgttcggcgctgtccctgccggcggctggaccgaaaccgcacccgcagccggcgacggccaggccgcgcgcctcgccctcatcgagtccaacccggtactggcgaacgccgaacggctgtcgctggacgacgcccgcgagctgttcggggcgaacatcaaggccctggcgaaccaaggcttcgacgtgtgcctgatcgacacggccccgacccttggcgtcggcctggcggccgccctcttcgcggccgactatgtgctgtcccccatcgagcttgaggcgtacagcatccagggcatcaagaagatggtcacgaccattgcgaacgtgcgccagaagaacgccaagctgcaattccttggcatggtgcccagcaaggtcgatgcgcggaatccgcgccacgcgcgccaccaagccgagctgctggccgcgtaccccaagatgatgattccggccaccgttggcctgcgcagcagcatcgccgatgccctcgcatccggtgtgccggtctggaagatcaagaaaacggccgcgcgcaaggcatcgaaagaggttcgcgccctggctgattacgtgttcacgaagatggagatttcccaatgactgcggctcaagccaagaccaccaagaaaaacaccgctgcggccgctcaggaagccgcaggcgcggcgcagccgtccggcctggggttggatagcatcggcgacctgtcgagcctcctggacgctcctgcggcgtctcagggcggttccggccctatcgagctggacctggacctgatcgacgaagatccgcatcagccgcggacggccgacaaccccggcttttccccggagagcatcgcggaaatcggtgccacgatcaaagagcgcggggtgaagtcacccatttcggtgcgcgagaaccaggagcagccgggccgctatatcatcaatcacggcgcccgccgctaccgtggctcgaagtgggccggcaagaagtccatcccggcgttcatcgacaacgactacaacgaagccgaccaggttatcgagaacctgcaacgcaacgagctgaccccgcgcgaaattgccgacttcattggccgcgagctggcgaagggcaagaagaaaggcgatatcgccaaggaaatcggcaagtcgccggcgttcatcacccagcacgtcacgctgctggacctgccggagaagatcgccgatgcgttcaacaccggccgcgtgcgcgacgtgaccgtggtgaacgagctggtgacggccttcaagaagcgcccggaggaagtcgaggcgtggcttgacgacgacacccaggaaatcacgcgcggcacggtcaagctgctgcgcgagttcctggacgagaagggccgcgatcccaacaccgtcgatgccttcaacggccagactgatgccgagcgtgacgcggaggccggcgacggccaggacggcgaggacggcgaccaggacggtaaggacgccaaggaaaagggcgcgaaggagccggacccggacaagctgaaaaaggccatcgtccaggtcgagcacgacgagcgccctgcccgccttatcctcaaccgtcggccgccggcggaaggctatgcctggttgaagtacgaggacgacggccaggagttcgaggcgaaccttgccgacgtgaaactggtcgcgctcatcgagggctgatccccaaagacagcggcgcgggccacccgcgccgcacaracaacggttccgctacaaggaggaccgaagaatgaatccgatgctgttctacatcgcgggaggcgtaggcgcggcgttgctgctggtttccgcgatcatgctgttcaagctgcgcgagccgaagaaggaacaccgaccgcagcgcaaggcggcggccccgacgccgcagccggtcgataacgagctgctgcgcacctttcgccggccgtcgcaggccagccaacccgagccatccacgacgccgccggcgcggcgcactgccccgccgagcagcgaacaatccagagggaatgacggcgatttcgtcacgtcggccctggtggccggggcgaccaacagcaccatgctgggctacctggccggcggctcgctgaccggggccatgctgggcgatgcgctgcggccggatacgccgtctgcggcgttcgcggacccctcgccgtgcttcggcagcagcgacacggacagcggctggaccgataccggcagctcttgcgatttcagttcgtccgacaccgatacgaacaactggtgagggcggaccatgactgacgaacaaaagaaacggctcctgatgttgcaagctatccggcgcagcatccaggcaatgcgcaggggtgtttcggggccggatagtttcaagggctggttgaccggcatcggcatcatcgcggcggggttcctggttggcgagctgctgccatcccctgcccccggcgtcggcctggttgtgccaggggcctgcattgccggcttcgtcgtcggctgctggctcaacaggaaaggccgctcatggccgacagccatttacgaccaattggcccgttaccagccgctcaacgagcgggcgtaccgcgacctgcaagagacggtgaaggaacgcggcctcgactgcgatgcggtcatggagtggacctacatcgagcaggccgagttcatgcccctggtgcccaccagggaggacctagcgcgcgacaagttcctgaccgcgacgcgggccgatagggccgaggacgatgcgcgtgcgcgcttcgtcgtgctccatcccaagaagcgcggccccgacgcatgaagaagcccgacgcccgctaatccccttcccgctgaccctttgcccccgccgaccgtgcggggctttttttgcctgcccttcagccgctaaaaaacctgccgttaagtcgagaactgttcagctaaactcttgcgctgataaggtaggtaagagtattattattcttaccaattaccggagccaacatggaactgaacaaagagacgcgcgaccgcatttttgcggctgcggacgagctgttcgagcaaggcgaccgggagaacttcccgaccgtggatgcagtgcgtaaggccgcccgcgtcaacatgaacgacgccagcgccggcatgcgcgaatggcgacgccagcgcacggcgcaggccgccccgctggcagtccaggtgccggacgcggtgcagcaggccggcaaccaggccgtggccgccctctggcaagccgcccaggcccttgccaatgaatcgttgcaggcagcgcaagccggctgggatcgtgagcgcaacgagttggaagccgtgcgcggggagctggccgacgccttcgaggcgcaggcccgcgagctggaagaagcccaggcgcgcgttacattgctagagcagcaggccgccgaggcggccgagctggccgcacgccagcggcaagccctggccgaagcacgcaccgccctggcaggagccgagcagcgggccgcgctggcgacgcagcgggccgacgaggtggagcgtcgagcgcaggagctgcgcgccgagctggactacgctcaccaggacgcccgcgcattcaaagaagagagccgcaagaccctggacgcggccaaccaggaaatgcaggcgcttcgcggcgagcgcgacgccaccaggcgcgaagcggagagtttgcgcacggagttggcagcggtgaaagcgaaggcgcaggccgacgccgaggcccaccaggagcaaaggaagttggcggcgcaagaggcggccaggcaggccgagcgctttacgacggtgcaagccgagcgtgacgaagcgcggcaagaggcaaaggcagcccaagaagaggccgctatgttgaggggtcggctagacgcggaaacgagtgggaggaaacacaaagcgggaggaaagtaactgataaatcgaacgcagttcactaaaatagatggaacaaccttgacgcgcccggctctagggaaagccggcctcgaactgccgaggtcggcttttttttagccggcaagcgaccaggacacgtttaacaccagaggcaaccgtcaggagtcacccaatgaaacaccgcctcctggtcatgaatgggcaaagaattgtccagaccgagaaccaaggcgcatggacgaaccagaaggtagataaagccggggccctgaaacctggcatttacaacatctatatggcccaaaaggccgataagtcgcagcgccacgacggcagcatcgtccacgcagatagcggcagcatttaccaacaggtggggaagaactttgtaatgcacgcccggtcagatttcgataaagtacctgaaatcgggagtgcgaaaagcatcacctatgacgcaagtggcaaggcacaggtaagtgccgaaagcgtcaagttgagtcgcgggcgcactcgttagagttttagcggctaaaaagggaggcgtcttgagcagctacagcagagccgagcgcgcaccgtggggagacttcccgaaggtggttcgcaacggcgaccttggttctttgaccaacgagcctgaataccaggctgcgaagcagggcgacgcggaagcggcgcttaatttggtcgagcgcctgatttcggacgacactgttgcccagctcaagacgctgatcggcgacgacaagccccgcatcgttccagtcctcgccgtcgaggcggcggggaacaacaagattccggccatgatggcggtcgttctggccgaccgccttggccttgaggtcgaaacggacattgtgcagcgggagaaggtcgcccgaaccggagccggttcagatcatcgcctggcgttcaacccgactttcgagggggaggtgatccccggccagaagtacatcgttgtcgatgacacgctgacgatgggcggcaccattgcctcattacgcggctacatcgagaacaacggcggcaaggtcatggcggcgtccgtcatgaccgcccatgaaggcgcgcttgacctggcggtcaagccgaagatgcttgcgggcatcaatgagaaacacggtccagcaatggacgcattttggaaggaaacctttggctatggcatcgaccgactcacccaaggagaagccggacacctccgcgctgccccgtccgttgacgcaatccgagatcgcatcgctgcggctcgaaatgaagcagtcaatcgagtgggggcaagccgaactgcgacgacggcgcgagcagggcaacagcagtccccggcagtaaagcagtccagcggcaacagcggcgaggatttgctacaggcggcccaggaggccgagacggaacagcaggccctcttagaatccgcgcccatcgagcagacctaccagcagacccttgcgctctacgtgcaggcaaagcatgaccaggtggagcgcatcgaggaccgcctagaacagctcgtagaccgtcagcaggcgcgtttgcagcagctacagtccaatgcccccggcttgctgtccctgccgcgtacaaaggccgcctggcagcagcagcaggcccaacagcaagcccgcttgcagaccctgcacacgcggctggacatggtgcgcgaaatcaaggaaggcatgggcattcacgcgcccaagatcgaggaactggcgacgcgcaagatgcgcgcggagcatcccgagctggccggcgactgggattcgatgcgtgaagcagcccgacggcaccaggccctgatgcgcaagcaggagcaggagaagaaacaggcccaggagcgcgagcgcgggcgcagtcagagcttgggcctgtcaaacaagcccagctaacgcaaaaacaaagcccggcaacgccgggctttttcatctgcgcctctgcgattcataacgaggcccacaccaccagggcggccgcgaacaacaccatgccgccggcgatcatgttcatcatcgccacgcgccgcgcgtccgcgaccttggccgcgagctggcggccaaggccgtcgtcgatttccctgcggatcgcttcggccgcctgcgcggcgctgtccttcattaccttcgccattgcgtccttgctggccgccagggccgcgttcagcatccgctccgctttggccttggcgtcctcgccccaacgatgggcgatcccttccagctcttccttgaacgcggcaaggatttcctcttgcttggccgcactgtcggccatgagccgggcgttgatggtatgcaggatcagcaccgggtcgtcgcggccgacggcgatgccgtgcttggccgcaatctcccggatcagctcttcaatctggtcgctcatagcacggccgccgcgtcgagctgttcaaacaggccgcgccgcacgatcttgaggcgttgccgcgtcatgatcgtgagcgattcatcggccagcgcctggtcgaacgtcagccgctcttgcagcatgtcgctgaaatcgcggccgtaggtttcttccttgagggccggaatctggatgatggacgacacgcgggccttgttggccgtgtacgccttcatctgctcaaagctcttgccctcatgctcgataggcccccaatacgggttcagccagaccacgaaaagcgcttcggccgggaactggctggcgagctgggcgaagccgctcaccgtgtccaggagagcctggccgccggtgacgacggtatggatgaccagctcatgccccatttcttgcagcagagccggcacctggttgctgatgaggtaatgcgacagaggcacgaacgagctggcaccgttgtcgatcaccacgtcatccttggtcggcgcaatcagctcgaccagggtgtcgaagttgcgcgagttaatttcgtcgccggccatgatgttcagccggcggacgttcagggccttgtagccctcgaacgtcgcgttcaccgggtcggtgtcgatgcacaagggtgtctgccccttgtccatcttgtactgcgcaatgatcgcggcgatggccgacttgccgaccccgcccttgccctgcaaaaccatgtgaattttcgccattacagtagatcctttttgtccggtgttgggttgaaggtgaagccggtcggggccgcagcgggggccggcttttcagccttgcccccctgcttcggccgccgtggctccggcgtcttgggtgccggcgcgggttccgcagccttggcctgcggtgcgggcacatcggcgggcttggccttgatgtgccgcctggcgtgcgagcggaacgtctcgtaggagaacttgaccttccccgtttcccgcatgtgctcccaaatggtgacgagcgcatagccggacgctaacgccgcctcgacatccgccctcaccgccaggaacgcaaccgcagcctcatcacgccggcgcttcttggccgcgcgggattcaacccactcggccagctcgtcggtgtagctctttggcatcgtctctcgcctgtcccctcagttcagtaatttcctgcatttgcctgtttccagtcggtagatattccacaaaacagcagggaagcagcgcttttccgctgcataaccctgcttcggggtcattatagcgattttttcggtatatccatcctttttcgcacgatatacaggattttgccaaagggttcgtgtagactttccttggtgtatccaacggcgtcagccgggcaggataggtgaagtaggcccacccgcgagcgggtgttccttcttcactgtcccttattcgcacctggcggtgctcaacgggaatcctgctctgcgaggctggccggctaccgccggcgtaacagatgagggcaagcggatggctgatgaaaccaagccaaccaggaagggcagcccacctatcaaggtgtactgccttccagacgaacgaagagcgattgaggaaaaggcggcggcggccggcatgagcctgtcggcctacctgctggccgtcggccagggctacaaaatcacgggcgtcgtggactatgagcacgtccgcgagctggcccgcatcaatggcgacctgggccgcctgggcggcctgctgaaactctggctcaccgacgacccgcgcacggcgcggttcggtgatgccacgatcctcgccctgctggcgaagatcgaagagaagcaggacgagcttggcaaggtcatgatgggcgtggtccgcccgagggcagagccatgacttttttagccgctaaaacggccggggggtgcgcgtgattgccaagcacgtccccatgcgctccatcaagaagagcgacttcgcggagctggtgaagtacatcaccgacgagcaaggcaagaccgagcgctcttcttcaatcgctgccgtcagacggtcagggaacgccgacaggccccgctccgcgtagttcggagcaggacgccgcacggcgtccacatggatcatccacccacttcccaggcccgcgagggcctggttgatgcgggcggacactacttcgcgctgctggtcggtgctgcttgcgttgtcatcgcccttgtacagccaggcagccataaagctgccgttcttgcccacgattacgccgtcatcgacgacagcggcgtagttgagcagatcggccaggccggcgtccttggaacgatgctttttcagtttcagttcggcatcgaccgcgcggatgcgggcaaagaggatgaacaacagaagcgcgccgaggcccgcgattgcaatcgcaattgcttggatcatcggtattgcttcccttggctattggtgttctcgcggaacggggtcgagcgggccgggtaatacggcttgtaccggcggtgacgcaggtacacgaaccgcatcttcggatcggccttcgccatgattcggaacgcatagagcgccccgaaccacaggatcagaccgaccacggtggcccgcagctcttgggcgctgaaaatcagcgcaaacgccatcaggcccgagaacatcaccagttcacgatcaccacccatgaacaggttttctcggttgcctgcgcgacggatggggatcgtgcgcagagccatgattaggcgagccgtccagccgctaccgcacgcacggcatccgccgccgcgacttgcacctggtgcagcgccccgttgccgagggccgcgatttcggcaccacgaccgaagaaggtgctcatcacgttctgcgcgccgaccagcagcgccatcaccagaaccaggaagatcagggttcggaagaaggcgttgagttcgccgccgaagatcagcacgccgccggcgacgacgatgccgatgatggacagcgcgaaggccaccgggccggttacggagttgcgcaggttcgtcagccagctctcatatggcaagctgccgccggtgccttccgaggccatcgccggatgcgcggataacgcgagagcgagaacgaagaacacggcaaggtagaacaaaatgccgcgattcatggtcagacggaacggaacagccgttgtcattggaaatactccttacagggttttggtgatgtactggccgttctcgtaaccaagaacttcgagaatttcttgcactcgacggccgctaggggtcctggcgatatggacgaccacatgaaccgcctcgccaatcagcggctcaatgggtttcggtgaatccgggtgcatgctgataagcatggcgagccggctcaggcccgctttggggttgtttgcgtgcagggtggcggcacctccttcatgcccggtgttccaggccatcaacagatcaagggcttcggggccacgtacctcaccgaccaggatgcggtcggggcgcatacgcagcgttgtcttgagcagcagcgtcatcgagacgtcgatgctggtgtggtattggacggcgttctctgcggcgcactggatttcgccggtgtcctcgatgatgacgacgcgctcagacgggttgaaggcgaccatttcattgatgatcgcgttgacgagcgtggtcttgcccgagccagtaccgccaatgacgaggatgtttcgatgcgccgcgacggcgcttttaatgacctcgtattgctcgcgggtcatgatgcccgcctcgacgtactgttccagcgtgaagatggcgaccgcgcgcttgcggatcgcaaaggttggcgcggccacgaccggcggcaattggccggcaaagcggctgccatccaaggggaactcgccttccaggatgggcgaatgccgcgtgacctctttgccgtggaatccggccaccgtttctataatcgcctgcgactggctgggccgcatgtcgcagatgtaccgcatcggctcgccaaggcgttcgtgccacaccttgccgtccgcgttgagcatgacttcaacggttttcgggtcgttgagcgcggccaacaggtccgcacccatgtcgcgttccagcttgcgcttggcccgctccttgatggtctgaaactcttctttcccgctcacttttcagtaacccctacgcaacaaatcattagcaacattatcgcacaggcaaacgatataccgaaagtgtttagcctgcaagacaaacagctaatcgaaccgcacgacgtaggggttctgatagaaaacaactgtcaaagcgcacccgcccgatgccattcgcggcacggcttccgttgaggatgtcgatatgatgcgcgagccgacggcccgcagagaaggggccgttttagcggctaaagaaggaagtgcaagccctaacccttggcgtcagagccttccacgcagcttttttcgggtgtcgtcgccccatttctttacgataaacgccttatgtgacggcaaaaccacactgatgcgttcgtatccgggcggcacgctgctcttgaaaggatgacccgcaatctccgcgagtgcctcgcggtcaaggtcggtggactccaggagaagaggtaggggagtttccagggcgtcggcaatggcctccatcaccttcaacgaggggttggccttaccgttggttaagtctgataaaaacgaaattgaaacccctgccctctccgacagctcatgtttcgtcatgccccgctcatcgagcagacgaaggatgttggtgaaaaatatctggttgtacacagcggaagccgcccctcgcacctttggtcgcggcccgcaaaattttagccgctaaagttcttgacagcggaaccaatgtttagctaaactagagtctcctttctcaaggagactttcgatatgagccataatcagttccagtttatcggtaatcttacccgtgacaccgaggtacgtcatggcaattctaacaagccgcaagcaattttcgatatagcggttaatgaagagtggcgcaacgatgccggcgacaagcaggagcgcaccgacttcttccgcatcaagtgttttggctctcaggccgaggcccacggcaagtatttgggcaaggggtcgctggtattcgtgcagggcaagattcggaataccaagtacgagaaggacggccagacggtctacgggaccgacttcattgccgataaggtggattatctggacaccaaggcaccaggcgggtcaaatcaggaataagggcacattgccccggcgtgagtcggggcaatcccgcaaggagggtgaatgaatcggacgttgaccggaaggcatacaggcaagaactgatcgacgcggggttttccgccgaggatgccgaaaccatcgcaagccgcaccgtcatgcgtgcgccccgcgaaaccttccagtccgtcggctcgatggtccagcaagctacggccaagatcgagcgcgacagcgtgcaactggctccccctgccctgcccgcgccatcggccgccgtggagcgttcgcgtcgtctcgaacaggaggcggcaggtttggcgaagtcgatgaccatcgacacgcgaggaactatgacgaccaagaagcgaaaaaccgccggcgaggacctggcaaaacaggtcagcgaggccaagcaggccgcgttgctgaaacacacgaagcagcagatcaaggaaatgcagctttccttgttcgatattgcgccgtggccggacacgatgcgagcgatgccaaacgacacggcccgctctgccctgttcaccacgcgcaacaagaaaatcccgcgcgaggcgctgcaaaacaaggtcattttccacgtcaacaaggacgtgaagatcacctacaccggcgtcgagctgcgggccgacgatgacgaactggtgtggcagcaggtgttggagtacgcgaagcgcacccctatcggcgagccgatcaccttcacgttctacgagctttgccaggacctgggctggtcgatcaatggccggtattacacgaaggccgaggaatgcctgtcgcgcctacaggcgacggcgatgggcttcacgtccgaccgcgttgggcacctggaatcggtgtcgctgctgcaccgcttccgcgtcctggaccgtggcaagaaaacgtcccgttgccaggtcctgatcgacgaggaaatcgtcgtgctgtttgctggcgaccactacacgaaattcatatgggagaagtaccgcaagctgtcgccgacggcccgacggatgttcgactatttcagctcgcaccgggagccgtacccgctcaagctggaaaccttccgcctcatgtgcggatcggattccacccgcgtgaagaagtggcgcgagcaggtcggcgaagcctgcgaagagttgcgaggcagcggcctggtggaacacgcctgggtcaatgatgacctggtgcattgcaaacgctagggccttgtggggtcagttccggctgggggttcagcagccagcgctttactggcatttcaggaacaagcgggcactgctcgacgcacttgcttcgctcagtatcgctcgggacgcacggcgcgctctacgaactgccgataaacagaggattaaaattgacaattgtgattaaggctcagattcgacggcttggagcggccgacgtgcaggatttccgcgagatccgattgtcggccctgaagaaagctccagagatgttcgggtccgtttacgagcacgaggagaaaaagcccatggaggcgttcgctgaacggttgcgagatgccgtggcattcggcgcctacatcgacggcgagatcattgggctgtcggtcttcaaacaggaggacggccccaaggacgctcacaaggcgcatctgtccggcgttttcgtggagcccgaacagcgaggccgaggggtcgccggtatgctgctgcgggcgttgccggcgggtttattgctcgtgatgatcgtccgacagattccaacgggaatctggtggatgcgcatcttcatcctcggcgcacttaatatttcgctattctggagcttgttgtttatttcggtctaccgcctgccgggcggggtcgcggcgacggtaggcgctgtgcagccgctgatggtcgtgttcatctctgccgctctgctaggtagcccgatacgattgatggcggtcctgggggctatttgcggaactgcgggcgtggcgctgttggtgttgacaccaaacgcagcgctagatcctgtcggcgtcgcagcgggcctggcgggggcggtttccatggcgttcggaaccgtgctgacccgcaagtggcaacctcccgtgcctctgctcacctttaccgcctggcaactggcggccggaggacttctgctcgttccagtagctttagtgtttgatccgccaatcccgatgcctacaggaaccaatgttctcggcctggcgtggctcggcctgatcggagcgggtttaacctacttcctttggttccgggggatctcgcgactcgaacctacagttgtttccttactgggctttctcagcccggggaccgccgtgttgctaggatggttgttcttggatcagacgctgagtgcgcttcaaatcatcggcgtcctgctcgtgatcgggagtatctggctgggccaacgttccaaccgcactcctagggcgcgtatagcttgccggaagtcgccttgacccgcatggcataggcctatcgtttccacgatcagcgatcggctcgttgccctgcgccgctccaaagcccgcgacgcagcgccggcaggcagagcaagtagagggcagcgcctgcaatccatgcccacccgttccacgttgttatagaagccgcatagatcgccgtgaagaggaggggtccgacgatcgaggtcaggctggtgagcgccgccagtgagccttgcagctgcccctgacgttcctcatccacctgcctggacaacattgcttgcagcgccggcattccgatgccacccgaagcaagcaggaccatgatcgggaacgccatccatccccgtgtcgcgaaggcaagcaggatgtagcctgtgccgtcggcaatcattccgagcatgagtgcccgcctttcgccgagccgggcggctacagggccggtgatcattgcctgggcgagtgaatgcagaatgccaaatgcggcaagcgaaatgccgatcgtggtcgcgtcccagtgaaagcgatcctcgccgaaaatgacccaaagcgcggccggcacctgtccgacaagttgcatgatgaagaagaccgccatcagggcggcgacgacggtcatgccccgggcccaccggaacgaagcgagcgggttgagagcctcccggcgtaacggccggcgttcgcctttgtgcgactccggcaaaaggaaacagcccgtcaggaaattgaggccgttcaaggctgccgcggcgaagaacggagcgtggggggagaaaccgcccatcagcccaccgagcacaggtcccgcgaccatcccgaacccgaaacaggcgctcatgaagccgaagtgccgcgcgcgctcatcgccatcagtgatatcggcaatataagcgccggctaccgccccagtcgccccggtgatgccggccacgatccgcccgatatagagaacccaaaggaaaggcgctgtcgccatgatggcgtagtcgacagtggcgccggccagcgagacgagcaagattggccgccgcccgaaacgatccgacagcgcgcccagcacaggtgcgcaggcaaattgcaccaacgcatacagcgccagcagaatgccatagtgggcggtgacgtcgttcgagtgaaccagatcgcgcaggaggcccggcagcaccggcataatcaggccgatgccgacagcgtcgagcgcgacagtgctcagaattacgatcaggggtatgttgggtttcacgtctggcctccggaccagcctccgctggtccgattgaacgcgcggattctttatcactgataagttggtggacatattatgtttatcagtgataaagtgtcaagcatgacaaagttgcagccgaatacagtgatccgtgccgccctggacctgttgaacgaggtcggcgtagacggtctgacgacacgcaaactggcggaacggttgggggttcagcagccggcgctttactggcacttcaggaacaagcgggcgctgctcgacgcactggccgaagccatgctggcggagaatcatacgcattcggtgccgagagccgacgacgactggcgctcatttctgatcgggaatgcccgcagcttcaggcaggcgctgctcgcctaccgcgatggcgcgcgcatccatgccggcacgcgaccgggcgcaccgcagatggaaacggccgacgcgcagcttcgcttcctctgcgaggcgggtttttcggccggggacgccgtcaatgcgctgatgacaatcagctacttcactgttggggccgtgcttgaggagcaggccggcgacagcgatgccggcgagcgcggcggcaccgttgaacaggctccgctctcgccgctgttgcgggccgcgatagacgccttcgacgaagccggtccggacgcagcgttcgagcagggactcgcggtgattgtcgatggattggcgaaaaggaggctcgttgtcaggaacgttgaaggaccgagaaagggtgacgattgatcaggaccgctgccggagcgcaacccactcactacagcagagccatgtagacaacatcccctccccctttccaccgcgtcagacgcccgtagcagcccgctacgggctttttcatgccctgccctagcgtccaagcctcacggccgcgctcggcctctctggcggccttctggcgctcctgctgcggcgtccgctcgtgggccgtggcgcgggtccgcgcgccggcctcgtgcgcctggcgctcgcgggcgaggtccagggcggccgtcttcacgttctgccttgcgcagatgagatagatcttggcagtcacagcatgcgcatatccatgcttcgaccatgcgctcacaaagtaggtgaatgcgcaatgtagtacccacatcgtcatcgctttccactgctctcgcgaataaagatggaaaatcaatctcatggtaatagtccatgaaaatccttgtattcataaatcctccaggtagctatatgcaaattgaaacaaaagagatggtgatctttctaagagatgatggaatctcccttcagtatcccgatggtcaatgcgctggatatgggatagatgggaatatgctgatttttatgggacagagttgcgaactgttcccaactaaaatcattttgcacgatcagcgcactacgaactttacccacaaatagtcaggtaatgaatcctgatataaagacaggttgataaatcagtcttctacgcgcatcgcacgcgcacaccgtagaaagtctttcagttgtgagcctgggcaaaccgttaactttcggcggctttgctgtgcgacaggctcacgtctaaaaggaaataaatcatgggtcataaaattatcacgttgtccggcgcggcgacggatgttctgtatgcgctgtttttccgtggcgcgttgctgtctggtgatctgccttctaaatctggcacagccgaattgcgcgagcttggttttgctgaaaccagacacacagcaactgaataccagaaagaaaatcactttacctttctgacatcagaagggcagaaatttgccgttgaacacctggtcaatacgcgttttggtgagcagcaatattgcgcttcgatgacgcttggcgttgagattgatacctctgctgcacaaaaggcaatcgacgagctggaccagcgcattcgtgacaccgtctccttcgaacacctggtgtacgtattgtgtgtgtgtgtgtgtgtgtgtgtgtgtgagagagagagagtgagagacggaggaagagaggggggcgcaagtcaaggaaggcgtagcgcatcatctggcacgtgcgtgacgcatctccgccgaagccggcctcatcgctgcgtggcccacgtagggcatgatagtgtgccctcttgagggcacgcgctccttcatgccggccttgcgcatcgacggcatccgcgctacggatgcgcaagagggaagggagcgcaggggctcggcgtggggccgccttgacgcatgagcgtgagtgccacaagcaagagaagatgcgcgcgcgagagaaagggaggagctgcacatgcccgtcccttctcgacggcagacggaacggagccgaccggtggccgagaggtgggaaaaggagggtgaggaagggcgtgcacagccggcctctgtgagatcgcgaattgaagaacagagaagcaaggagagaggagggcgacggtatcctgctgcaccgccttgcgagcacaacaccaagacgggcataaacacgagcgaccgattccgcgaacgctcacacgaggatctgaattcggcccctagaactagaactagtggatctccgaggctagttaggcgtcatcctgtgctcccgagaaccagtaccagtacatcgctgtttcgttcgagacttgaggtctagttttatacgtgaacaggtcaatgccgccgagagtaaagccacattttgcgtacaaattgcaggcaggtacattgttcgtttgtgtctctaatcgtatgccaaggagctgtctgcttagtgcccactttttcgcaaattcgatgagactgtgcgcgactcctttgcctcggtgcgtgtgcgacacaacaatgtgttcgatagaggctagatcgttccatgttgagttgagttcaatcttcccgacaagctcttggtcgatgaatgcgccatagcaagcagagtcttcatcagagtcatcatccgagatgtaatccttccggtaggggctcacacttctggtagatagttcaaagccttggtcggataggtgcacatcgaacacttcacgaacaatgaaatggttctcagcatccaatgtttccgccacctgctcagggatcaccgaaatcttcatactaggatccggctgctgtggaggtgtgtagagcggtgggtgggtgggtgggtgggtggggctggctgtgcgagggagggggggctgtggagagtcaatgtgcagcgagcgagagaggcggagagggcgtcagtggctgtgtcagagtcgaagagggtaggtgggtaagagtggtggtggatgtgatacttgaagaaatggttgtggccgtagcgcgtttgatgggcgggggagaggaaggcgtggagggttggaggagagatggccatgcatcgtgacaagacacacacacacacacacacacaacggaaagaaggggaaagggagggagctcgacgcgcgtgagctgcggaggtggtcggaagcagtacgcctccgcgacgcagaagtgggattcataggtggttccgacgtttcagcgcccataatacgggcaggctcctctccctccttcgcaatacggacacaagttgagagtgctgctgatccaaccgtttcctgccccgcccccgtgcgccctcccccccaattttcctcagcacggtgccattcgcagtggtgtgcgcgcgtgtgtagacgtcctgcagtaaatctcctttcctgcatcgccgcgttgtctctcgctaccatccgttccacggctcgacgtctgcatgccagcggacagggggccgcgcaacgcatcgccacgccttctacttttctcttcgtgacatgagcgttgcgcgggtgtgtggggagtcgcaggaacgacagtgacaggagccgcgggggggggggggggaggggggcggggggcgggcgggtagcgatatgataaaggaccagacacagcagataatgctcgtacccgcatgtgcgatgggggatcgatccgtttatgcctcccttcccccctccgtcctcgtcgtcgtgcacccacacgcccctgcgcgcacgagagagagagagagagatcgggcttttcgtgcccgactcttcgtgctattatgtttttgtcttcccaatttaatactcaactacatgatcaaataaacgagaccgtgcgagagacgtatgcggctcggcctgagatgcgtttgtgtgcctgtgtgtgcctgtgtgtgtgtgtgtgtgtgtgtgtgtgcgtgcctgcgcgtggatatacacacgcatcatgggcagtcaaaccctttcacgcggagagctgaggcgagacgcacgcgtacacaacacacggacacatgcacgaacacgcatgcagagagatcatacatcatctatagagaagtacacgtaaaagtaagactcgtcgtctgccagctacaaccgagaaggcgacgtgaaaggaacaagaaaggaggaggagggcggccgcctagtggtggtgatggtggtgtacgtacacctggtgttcgaacttattcgcaatggagtgtcattcatcaaggacgccgctatcgcaaatggtgctatccacgcagcggcaatcgaaacacctcagccggtgaccaatatctacaacatcagccttggtatccagcgtgatgagccagcgcagaacaaggtaaccgtcagtgccgataagttcaaagttaaacctggtgttgataccaacattgaaacgttgatcgaaaacgcgctgaaaaacgctgctgaatgtgcggcgctggatgtcacaaagcaaatggcagcagacaagaaagcgatggatgaactggcttcctatgtccgcacggccatcatgatggaatgtttccccggtggtgttatctggcagcagtgccgtcgatagtatgcaattgataattattatcatttgcgggtcctttccggcgatccgccttgttacggggcggcgacctcgcgggttttcgctatttatgaaaattttccggtttaaggcgtttccgttcttcttcgtcataacttaatgtttttatttaaaataccctctgaaaagaaaggaaacgacaggtgctgaaagcgagctttttggcctctgtcgtttcctttctctgtttttgtccgtggaatgaacaatggaagtcaacaaaaagcagctggctgacattttcggtgcgagtatccgtaccattcagaactggcaggaacagggaatgcccgttctgcgaggcggtggcaagggtaatgaggtgctttatgactctgccgccgtcataaaatggtatgccgaaagggatgctgaaattgagaacgaaaagctgcgccgggaggttgaagaactgcggcaggccagcgaggcagatctagcgtggaytcaagrmtctcgcgaatggctcgcgtyggaractttcattgwcacttgaggggcaccgcagggaaattctcgtccttgcgagaaccggctatgtcgtgctgcgcatcgagcctgcgcccttggcttgtctcgcccctctccgcgtcgctacggggcttccagcgcctttccgacgctcaccgggctggttgccctcgccgctgggctggcggccgtctatggccctgcaaacgcgccagaaacgccgtcgaagccgtgtgcgagacaccgcggccgccggcgttgtggatacctcgcggaaaacttggccctcactgacagatgaggggcggacgttgacacttgaggggccgactcacccggcgcggcgttgacagatgaggggcaggctcgatttcggccggcgacgtggagctggccagcctcgcaaatcggcgaaaacgcctgattttacgcgagtttcccacagatgatgtggacaagcctggggataagtgccctgcggtattgacacttgaggggcgcgactactgacagatgaggggcgcgatccttgacacttgaggggcagagtgctgacagatgaggggcgcacctattgacatttgaggggctgtccacaggcagaaaatccagcatttgcaagggtttccgcccgtttttcggccaccgctaacctgtcttttaacctgcttttaaaccaatatttataaaccttgtttttaaccagggctgcgccctgtgcgcgtgaccgcgcacgccgaaggggggtgcccccccttctcgaaccctcccggcccgctaacgcgggcctcccatccccccaggggctgcgcccctcggccgcgaacggcctcaccccaaaaatggcagcgctggcagtccttgccattgccgggatcggggcagtaacgggatgggcgatcagcccgagcgcgacgcccggaagcattgacgtgccgcaggtgctggcatcgacattcagcgaccaggtgccgggcagtgagggcggcggcctgggtggcggcctgcccttcacttcggccgtcggggcattcacggacttcatggcggggccggcaatttttaccttgggcattcttggcatagtggtcgcgggtgccgtgctcgtgttcgggggtg

SEQ ID NO: 7 - DNA, 23363 bp, Artificial Sequence
  pLMTB6412
aaccggtgaattcagcgggttcgtgcgatccgtctgcatgatggtgatagccgtcagcatgattttcgtgtcgtcgaacttggtgaagggcattctcggcggcgatcacgacgccggccctgcggagccttcgccgcgtgcgcgattcatggcggccgtggaggccaaggatttcgcgcgagtgcaagagctgatcgaggcgcgtggagccaagtcggcggctgattatgtccttgcgcagctcgccgtggccgaaggtctggaccgcaagcctggtgcgcgcgtcgtggtcgggaaagcggcgggcagcatggcaatgccgcctgcggcgctgggttttacgccaaggggagaagcggcatacgccatcgagcggtcagcctatggtgagccgaggtccagcattgcgaagcagtaccagcaggaatggaaccggaaggcggcgacctggtgggcgatggccggtgtggccggcatcatcggcgcgatcctggcggcggcggcaaccggctttgttgggctggcagtgtcgatccgcaaccgagtgaagcgcgtgcgcgacctgttggtgatggagccgggtgcagagccataagcggcaagagacgaaagcccggtttccgggcttttgttttgttacgccaaggacgagttttagcggctaaaggtgttgacgtgcgagaaatgtttagctaaacttctctcatgtgctggcggctgtcaccgctatgttcaaccaaggcgcggagcaaattatgggtgttatccatgaagaaacggcttaccgaaagccagttccaggaggcgatccaggggctggaagtggggcagcagaccatcgagatagcgcggggcgtcttagtcgatgggaagccacaggcgacgttcgcaacgtcgctgggactgaccaggggcgcagtgtcgcaagcggtgcatcgcgtgtgggccgcgttcgaggacaagaacttgcccgaggggtacgcgcgggtaacggcggttctgccggaacatcaggcgtacatcgtccggaagtgggaagcggacgccaagaaaaaacaggaaaccaaacgatgaaaactttggtcacggccaaccagaaaggcggcgtcggcaagacttcgacccttgtgcatcttgccttcgactttttcgagcgcggcttgcgggttgccgtgatcgacctggacccccagggcaatgcgtcctacacgctcaaggactttgctaccggcctgcatgcaagcaagctgttcggcgctgtccctgccggcggctggaccgaaaccgcacccgcagccggcgacggccaggccgcgcgcctcgccctcatcgagtccaacccggtactggcgaacgccgaacggctgtcgctggacgacgcccgcgagctgttcggggcgaacatcaaggccctggcgaaccaaggcttcgacgtgtgcctgatcgacacggccccgacccttggcgtcggcctggcggccgccctcttcgcggccgactatgtgctgtcccccatcgagcttgaggcgtacagcatccagggcatcaagaagatggtcacgaccattgcgaacgtgcgccagaagaacgccaagctgcaattccttggcatggtgcccagcaaggtcgatgcgcggaatccgcgccacgcgcgccaccaagccgagctgctggccgcgtaccccaagatgatgattccggccaccgttggcctgcgcagcagcatcgccgatgccctcgcatccggtgtgccggtctggaagatcaagaaaacggccgcgcgcaaggcatcgaaagaggttcgcgccctggctgattacgtgttcacgaagatggagatttcccaatgactgcggctcaagccaagaccaccaagaaaaacaccgctgcggccgctcaggaagccgcaggcgcggcgcagccgtccggcctggggttggatagcatcggcgacctgtcgagcctcctggacgctcctgcggcgtctcagggcggttccggccctatcgagctggacctggacctgatcgacgaagatccgcatcagccgcggacggccgacaaccccggcttttccccggagagcatcgcggaaatcggtgccacgatcaaagagcgcggggtgaagtcacccatttcggtgcgcgagaaccaggagcagccgggccgctatatcatcaatcacggcgcccgccgctaccgtggctcgaagtgggccggcaagaagtccatcccggcgttcatcgacaacgactacaacgaagccgaccaggttatcgagaacctgcaacgcaacgagctgaccccgcgcgaaattgccgacttcattggccgcgagctggcgaagggcaagaagaaaggcgatatcgccaaggaaatcggcaagtcgccggcgttcatcacccagcacgtcacgctgctggacctgccggagaagatcgccgatgcgttcaacaccggccgcgtgcgcgacgtgaccgtggtgaacgagctggtgacggccttcaagaagcgcccggaggaagtcgaggcgtggcttgacgacgacacccaggaaatcacgcgcggcacggtcaagctgctgcgcgagttcctggacgagaagggccgcgatcccaacaccgtcgatgccttcaacggccagactgatgccgagcgtgacgcggaggccggcgacggccaggacggcgaggacggcgaccaggacggtaaggacgccaaggaaaagggcgcgaaggagccggacccggacaagctgaaaaaggccatcgtccaggtcgagcacgacgagcgccctgcccgccttatcctcaaccgtcggccgccggcggaaggctatgcctggttgaagtacgaggacgacggccaggagttcgaggcgaaccttgccgacgtgaaactggtcgcgctcatcgagggctgatccccaaagacagcggcgcgggccacccgcgccgcacagacaacggttccgctacaaggaggaccgaagaatgaatccgatgctgttctacatcgcgggaggcgtaggcgcggcgttgctgctggtttccgcgatcatgctgttcaagctgcgcgagccgaagaaggaacaccgaccgcagcgcaaggcggcggccccgacgccgcagccggtcgataacgagctgctgcgcacctttcgccggccgtcgcaggccagccaacccgagccatccacgacgccgccggcgcggcgcactgccccgccgagcagcgaacaatccagagggaatgacggcgatttcgtcacgtcggccctggtggccggggcgaccaacagcaccatgctgggctacctggccggcggctcgctgaccggggccatgctgggcgatgcgctgcggccggatacgccgtctgcggcgttcgcggacccctcgccgtgcttcggcagcagcgacacggacagcggctggaccgataccggcagctcttgcgatttcagttcgtccgacaccgatacgaacaactggtgagggcggaccatgactgacgaacaaaagaaacggctcctgatgttgcaagctatccggcgcagcatccaggcaatgcgcaggggtgtttcggggccggatagtttcaagggctggttgaccggcatcggcatcatcgcggcggggttcctggttggcgagctgctgccatcccctgcccccggcgtcggcctggttgtgccaggggcctgcattgccggcttcgtcgtcggctgctggctcaacaggaaaggccgctcatggccgacagccatttacgaccaattggcccgttaccagccgctcaacgagcgggcgtaccgcgacctgcaagagacggtgaaggaacgcggcctcgactgcgatgcggtcatggagtggacctacatcgagcaggccgagttcatgcccctggtgcccaccagggaggacctagcgcgcgacaagttcctgaccgcgacgcgggccgatagggccgaggacgatgcgcgtgcgcgcttcgtcgtgctccatcccaagaagcgcggccccgacgcatgaagaagcccgacgcccgctaatccccttcccgctgaccctttgcccccgccgaccgtgcggggctttttttgcctgcccttcagccgctaaaaaacctgccgttaagtcgagaactgttcagctaaactcttgcgctgataaggtaggtaagagtattattattcttaccaattaccggagccaacatggaactgaacaaagagacgcgcgaccgcatttttgcggctgcggacgagctgttcgagcaaggcgaccgggagaacttcccgaccgtggatgcagtgcgtaaggccgcccgcgtcaacatgaacgacgccagcgccggcatgcgcgaatggcgacgccagcgcacggcgcaggccgccccgctggcagtccaggtgccggacgcggtgcagcaggccggcaaccaggccgtggccgccctctggcaagccgcccaggcccttgccaatgaatcgttgcaggcagcgcaagccggctgggatcgtgagcgcaacgagttggaagccgtgcgcggggagctggccgacgccttcgaggcgcaggcccgcgagctggaagaagcccaggcgcgcgttacattgctagagcagcaggccgccgaggcggccgagctggccgcacgccagcggcaagccctggccgaagcacgcaccgccctggcaggagccgagcagcgggccgcgctggcgacgcagcgggccgacgaggtggagcgtcgagcgcaggagctgcgcgccgagctggactacgctcaccaggacgcccgcgcattcaaagaagagagccgcaagaccctggacgcggccaaccaggaaatgcaggcgcttcgcggcgagcgcgacgccaccaggcgcgaagcggagagtttgcgcacggagttggcagcggtgaaagcgaaggcgcaggccgacgccgaggcccaccaggagcaaaggaagttggcggcgcaagaggcggccaggcaggccgagcgctttacgacggtgcaagccgagcgtgacgaagcgcggcaagaggcaaaggcagcccaagaagaggccgctatgttgaggggtcggctagacgcggaaacgagtgggaggaaacacaaagcgggaggaaagtaactgataaatcgaacgcagttcactaaaatagatggaacaaccttgacgcgcccggctctagggaaagccggcctcgaactgccgaggtcggcttttttttagccggcaagcgaccaggacacgtttaacaccagaggcaaccgtcaggagtcacccaatgaaacaccgcctcctggtcatgaatgggcaaagaattgtccagaccgagaaccaaggcgcatggacgaaccagaaggtagataaagccggggccctgaaacctggcatttacaacatctatatggcccaaaaggccgataagtcgcagcgccacgacggcagcatcgtccacgcagatagcggcagcatttaccaacaggtggggaagaactttgtaatgcacgcccggtcagatttcgataaagtacctgaaatcgggagtgcgaaaagcatcacctatgacgcaagtggcaaggcacaggtaagtgccgaaagcgtcaagttgagtcgcgggcgcactcgttagagttttagcggctaaaaagggaggcgtcttgagcagctacagcagagccgagcgcgcaccgtggggagacttcccgaaggtggttcgcaacggcgaccttggttctttgaccaacgagcctgaataccaggctgcgaagcagggcgacgcggaagcggcgcttaatttggtcgagcgcctgatttcggacgacactgttgcccagctcaagacgctgatcggcgacgacaagccccgcatcgttccagtcctcgccgtcgaggcggcggggaacaacaagattccggccatgatggcggtcgttctggccgaccgccttggccttgaggtcgaaacggacattgtgcagcgggagaaggtcgcccgaaccggagccggttcagatcatcgcctggcgttcaacccgactttcgagggggaggtgatccccggccagaagtacatcgttgtcgatgacacgctgacgatgggcggcaccattgcctcattacgcggctacatcgagaacaacggcggcaaggtcatggcggcgtccgtcatgaccgcccatgaaggcgcgcttgacctggcggtcaagccgaagatgcttgcgggcatcaatgagaaacacggtccagcaatggacgcattttggaaggaaacctttggctatggcatcgaccgactcacccaaggagaagccggacacctccgcgctgccccgtccgttgacgcaatccgagatcgcatcgctgcggctcgaaatgaagcagtcaatcgagtgggggcaagccgaactgcgacgacggcgcgagcagggcaacagcagtccccggcagtaaagcagtccagcggcaacagcggcgaggatttgctacaggcggcccaggaggccgagacggaacagcaggccctcttagaatccgcgcccatcgagcagacctaccagcagacccttgcgctctacgtgcaggcaaagcatgaccaggtggagcgcatcgaggaccgcctagaacagctcgtagaccgtcagcaggcgcgtttgcagcagctacagtccaatgcccccggcttgctgtccctgccgcgtacaaaggccgcctggcagcagcagcaggcccaacagcaagcccgcttgcagaccctgcacacgcggctggacatggtgcgcgaaatcaaggaaggcatgggcattcacgcgcccaagatcgaggaactggcgacgcgcaagatgcgcgcggagcatcccgagctggccggcgactgggattcgatgcgtgaagcagcccgacggcaccaggccctgatgcgcaagcaggagcaggagaagaaacaggcccaggagcgcgagcgcgggcgcagtcagagcttgggcctgtcaaacaagcccagctaacgcaaaaacaaagcccggcaacgccgggctttttcatctgcgcctctgcgattcataacgaggcccacaccaccagggcggccgcgaacaacaccatgccgccggcgatcatgttcatcatcgccacgcgccgcgcgtccgcgaccttggccgcgagctggcggccaaggccgtcgtcgatttccctgcggatcgcttcggccgcctgcgcggcgctgtccttcattaccttcgccattgcgtccttgctggccgccagggccgcgttcagcatccgctccgctttggccttggcgtcctcgccccaacgatgggcgatcccttccagctcttccttgaacgcggcaaggatttcctcttgcttggccgcactgtcggccatgagccgggcgttgatggtatgcaggatcagcaccgggtcgtcgcggccgacggcgatgccgtgcttggccgcaatctcccggatcagctcttcaatctggtcgctcatagcacggccgccgcgtcgagctgttcaaacaggccgcgccgcacgatcttgaggcgttgccgcgtcatgatcgtgagcgattcatcggccagcgcctggtcgaacgtcagccgctcttgcagcatgtcgctgaaatcgcggccgtaggtttcttccttgagggccggaatctggatgatggacgacacgcgggccttgttggccgtgtacgccttcatctgctcaaagctcttgccctcatgctcgataggcccccaatacgggttcagccagaccacgaaaagcgcttcggccgggaactggctggcgagctgggcgaagccgctcaccgtgtccaggagagcctggccgccggtgacgacggtatggatgaccagctcatgccccatttcttgcagcagagccggcacctggttgctgatgaggtaatgcgacagaggcacgaacgagctggcaccgttgtcgatcaccacgtcatccttggtcggcgcaatcagctcgaccagggtgtcgaagttgcgcgagttaatttcgtcgccggccatgatgttcagccggcggacgttcagggccttgtagccctcgaacgtcgcgttcaccgggtcggtgtcgatgcacaagggtgtctgccccttgtccatcttgtactgcgcaatgatcgcggcgatggccgacttgccgaccccgcccttgccctgcaaaaccatgtgaattttcgccattacagtagatcctttttgtccggtgttgggttgaaggtgaagccggtcggggccgcagcgggggccggcttttcagccttgcccccctgcttcggccgccgtggctccggcgtcttgggtgccggcgcgggttccgcagccttggcctgcggtgcgggcacatcggcgggcttggccttgatgtgccgcctggcgtgcgagcggaacgtctcgtaggagaacttgaccttccccgtttcccgcatgtgctcccaaatggtgacgagcgcatagccggacgctaacgccgcctcgacatccgccctcaccgccaggaacgcaaccgcagcctcatcacgccggcgcttcttggccgcgcgggattcaacccactcggccagctcgtcggtgtagctctttggcatcgtctctcgcctgtcccctcagttcagtaatttcctgcatttgcctgtttccagtcggtagatattccacaaaacagcagggaagcagcgcttttccgctgcataaccctgcttcggggtcattatagcgattttttcggtatatccatcctttttcgcacgatatacaggattttgccaaagggttcgtgtagactttccttggtgtatccaacggcgtcagccgggcaggataggtgaagtaggcccacccgcgagcgggtgttccttcttcactgtcccttattcgcacctggcggtgctcaacgggaatcctgctctgcgaggctggccggctaccgccggcgtaacagatgagggcaagcggatggctgatgaaaccaagccaaccaggaagggcagcccacctatcaaggtgtactgccttccagacgaacgaagagcgattgaggaaaaggcggcggcggccggcatgagcctgtcggcctacctgctggccgtcggccagggctacaaaatcacgggcgtcgtggactatgagcacgtccgcgagctggcccgcatcaatggcgacctgggccgcctgggcggcctgctgaaactctggctcaccgacgacccgcgcacggcgcggttcggtgatgccacgatcctcgccctgctggcgaagatcgaagagaagcaggacgagcttggcaaggtcatgatgggcgtggtccgcccgagggcagagccatgacttttttagccgctaaaacggccggggggtgcgcgtgattgccaagcacgtccccatgcgctccatcaagaagagcgacttcgcggagctggtgaagtacatcaccgacgagcaaggcaagaccgagcgctcttcttcaatcgctgccgtcagacggtcagggaacgccgacaggccccgctccgcgtagttcggagcaggacgccgcacggcgtccacatggatcatccacccacttcccaggcccgcgagggcctggttgatgcgggcggacactacttcgcgctgctggtcggtgctgcttgcgttgtcatcgcccttgtacagccaggcagccataaagctgccgttcttgcccacgattacgccgtcatcgacgacagcggcgtagttgagcagatcggccaggccggcgtccttggaacgatgctttttcagtttcagttcggcatcgaccgcgcggatgcgggcaaagaggatgaacaacagaagcgcgccgaggcccgcgattgcaatcgcaattgcttggatcatcggtattgcttcccttggctattggtgttctcgcggaacggggtcgagcgggccgggtaatacggcttgtaccggcggtgacgcaggtacacgaaccgcatcttcggatcggccttcgccatgattcggaacgcatagagcgccccgaaccacaggatcagaccgaccacggtggcccgcagctcttgggcgctgaaaatcagcgcaaacgccatcaggcccgagaacatcaccagttcacgatcaccacccatgaacaggttttctcggttgcctgcgcgacggatggggatcgtgcgcagagccatgattaggcgagccgtccagccgctaccgcacgcacggcatccgccgccgcgacttgcacctggtgcagcgccccgttgccgagggccgcgatttcggcaccacgaccgaagaaggtgctcatcacgttctgcgcgccgaccagcagcgccatcaccagaaccaggaagatcagggttcggaagaaggcgttgagttcgccgccgaagatcagcacgccgccggcgacgacgatgccgatgatggacagcgcgaaggccaccgggccggttacggagttgcgcaggttcgtcagccagctctcatatggcaagctgccgccggtgccttccgaggccatcgccggatgcgcggataacgcgagagcgagaacgaagaacacggcaaggtagaacaaaatgccgcgattcatggtcagacggaacggaacagccgttgtcattggaaatactccttacagggttttggtgatgtactggccgttctcgtaaccaagaacttcgagaatttcttgcactcgacggccgctaggggtcctggcgatatggacgaccacatgaaccgcctcgccaatcagcggctcaatgggtttcggtgaatccgggtgcatgctgataagcatggcgagccggctcaggcccgctttggggttgtttgcgtgcagggtggcggcacctccttcatgcccggtgttccaggccatcaacagatcaagggcttcggggccacgtacctcaccgaccaggatgcggtcggggcgcatacgcagcgttgtcttgagcagcagcgtcatcgagacgtcgatgctggtgtggtattggacggcgttctctgcggcgcactggatttcgccggtgtcctcgatgatgacgacgcgctcagacgggttgaaggcgaccatttcattgatgatcgcgttgacgagcgtggtcttgcccgagccagtaccgccaatgacgaggatgtttcgatgcgccgcgacggcgcttttaatgacctcgtattgctcgcgggtcatgatgcccgcctcgacgtactgttccagcgtgaagatggcgaccgcgcgcttgcggatcgcaaaggttggcgcggccacgaccggcggcaattggccggcaaagcggctgccatccaaggggaactcgccttccaggatgggcgaatgccgcgtgacctctttgccgtggaatccggccaccgtttctataatcgcctgcgactggctgggccgcatgtcgcagatgtaccgcatcggctcgccaaggcgttcgtgccacaccttgccgtccgcgttgagcatgacttcaacggttttcgggtcgttgagcgcggccaacaggtccgcacccatgtcgcgttccagcttgcgcttggcccgctccttgatggtctgaaactcttctttcccgctcacttttcagtaacccctacgcaacaaatcattagcaacattatcgcacaggcaaacgatataccgaaagtgtttagcctgcaagacaaacagctaatcgaaccgcacgacgtaggggttctgatagaaaacaactgtcaaagcgcacccgcccgatgccattcgcggcacggcttccgttgaggatgtcgatatgatgcgcgagccgacggcccgcagagaaggggccgttttagcggctaaagaaggaagtgcaagccctaacccttggcgtcagagccttccacgcagcttttttcgggtgtcgtcgccccatttctttacgataaacgccttatgtgacggcaaaaccacactgatgcgttcgtatccgggcggcacgctgctcttgaaaggatgacccgcaatctccgcgagtgcctcgcggtcaaggtcggtggactccaggagaagaggtaggggagtttccagggcgtcggcaatggcctccatcaccttcaacgaggggttggccttaccgttggttaagtctgataaaaacgaaattgaaacccctgccctctccgacagctcatgtttcgtcatgccccgctcatcgagcagacgaaggatgttggtgaaaaatatctggttgtacacagcggaagccgcccctcgcacctttggtcgcggcccgcaaaattttagccgctaaagttcttgacagcggaaccaatgtttagctaaactagagtctcctttctcaaggagactttcgatatgagccataatcagttccagtttatcggtaatcttacccgtgacaccgaggtacgtcatggcaattctaacaagccgcaagcaattttcgatatagcggttaatgaagagtggcgcaacgatgccggcgacaagcaggagcgcaccgacttcttccgcatcaagtgttttggctctcaggccgaggcccacggcaagtatttgggcaaggggtcgctggtattcgtgcagggcaagattcggaataccaagtacgagaaggacggccagacggtctacgggaccgacttcattgccgataaggtggattatctggacaccaaggcaccaggcgggtcaaatcaggaataagggcacattgccccggcgtgagtcggggcaatcccgcaaggagggtgaatgaatcggacgtttgaccggaaggcatacaggcaagaactgatcgacgcggggttttccgccgaggatgccgaaaccatcgcaagccgcaccgtcatgcgtgcgccccgcgaaaccttccagtccgtcggctcgatggtccagcaagctacggccaagatcgagcgcgacagcgtgcaactggctccccctgccctgcccgcgccatcggccgccgtggagcgttcgcgtcgtctcgaacaggaggcggcaggtttggcgaagtcgatgaccatcgacacgcgaggaactatgacgaccaagaagcgaaaaaccgccggcgaggacctggcaaaacaggtcagcgaggccaagcaggccgcgttgctgaaacacacgaagcagcagatcaaggaaatgcagctttccttgttcgatattgcgccgtggccggacacgatgcgagcgatgccaaacgacacggcccgctctgccctgttcaccacgcgcaacaagaaaatcccgcgcgaggcgctgcaaaacaaggtcattttccacgtcaacaaggacgtgaagatcacctacaccggcgtcgagctgcgggccgacgatgacgaactggtgtggcagcaggtgttggagtacgcgaagcgcacccctatcggcgagccgatcaccttcacgttctacgagctttgccaggacctgggctggtcgatcaatggccggtattacacgaaggccgaggaatgcctgtcgcgcctacaggcgacggcgatgggcttcacgtccgaccgcgttgggcacctggaatcggtgtcgctgctgcaccgcttccgcgtcctggaccgtggcaagaaaacgtcccgttgccaggtcctgatcgacgaggaaatcgtcgtgctgtttgctggcgaccactacacgaaattcatatgggagaagtaccgcaagctgtcgccgacggcccgacggatgttcgactatttcagctcgcaccgggagccgtacccgctcaagctggaaaccttccgcctcatgtgcggatcggattccacccgcgtgaagaagtggcgcgagcaggtcggcgaagcctgcgaagagttgcgaggcagcggcctggtggaacacgcctgggtcaatgatgacctggtgcattgcaaacgctagggccttgtggggtcagttccggctgggggttcagcagccagcgctttactggcatttcaggaacaagcgggcactgctcgacgcacttgcttcgctcagtatcgctcgggacgcacggcgcgctctacgaactgccgataaacagaggattaaaattgacaattgtgattaaggctcagattcgacggcttggagcggccgacgtgcaggatttccgcgagatccgattgtcggccctgaagaaagctccagagatgttcgggtccgtttacgagcacgaggagaaaaagcccatggaggcgttcgctgaacggttgcgagatgccgtggcattcggcgcctacatcgacggcgagatcattgggctgtcggtcttcaaacaggaggacggccccaaggacgctcacaaggcgcatctgtccggcgttttcgtggagcccgaacagcgaggccgaggggtcgccggtatgctgctgcgggcgttgccggcgggtttattgctcgtgatgatcgtccgacagattccaacgggaatctggtggatgcgcatcttcatcctcggcgcacttaatatttcgctattctggagcttgttgtttatttcggtctaccgcctgccgggcggggtcgcggcgacggtaggcgctgtgcagccgctgatggtcgtgttcatctctgccgctctgctaggtagcccgatacgattgatggcggtcctgggggctatttgcggaactgcgggcgtggcgctgttggtgttgacaccaaacgcagcgctagatcctgtcggcgtcgcagcgggcctggcgggggcggtttccatggcgttcggaaccgtgctgacccgcaagtggcaacctcccgtgcctctgctcacctttaccgcctggcaactggcggccggaggacttctgctcgttccagtagctttagtgtttgatccgccaatcccgatgcctacaggaaccaatgttctcggcctggcgtggctcggcctgatcggagcgggtttaacctacttcctttggttccgggggatctcgcgactcgaacctacagttgtttccttactgggctttctcagcccggggaccgccgtgttgctaggatggttgttcttggatcagacgctgagtgcgcttcaaatcatcggcgtcctgctcgtgatcgggagtatctggctgggccaacgttccaaccgcactcctagggcgcgtatagcttgccggaagtcgccttgacccgcatggcataggcctatcgtttccacgatcagcgatcggctcgttgccctgcgccgctccaaagcccgcgacgcagcgccggcaggcagagcaagtagagggcagcgcctgcaatccatgcccacccgttccacgttgttatagaagccgcatagatcgccgtgaagaggaggggtccgacgatcgaggtcaggctggtgagcgccgccagtgagccttgcagctgcccctgacgttcctcatccacctgcctggacaacattgcttgcagcgccggcattccgatgccacccgaagcaagcaggaccatgatcgggaacgccatccatccccgtgtcgcgaaggcaagcaggatgtagcctgtgccgtcggcaatcattccgagcatgagtgcccgcctttcgccgagccgggcggctacagggccggtgatcattgcctgggcgagtgaatgcagaatgccaaatgcggcaagcgaaatgccgatcgtggtcgcgtcccagtgaaagcgatcctcgccgaaaatgacccaaagcgcggccggcacctgtccgacaagttgcatgatgaagaagaccgccatcagggcggcgacgacggtcatgccccgggcccaccggaacgaagcgagcgggttgagagcctcccggcgtaacggccggcgttcgcctttgtgcgactccggcaaaaggaaacagcccgtcaggaaattgaggccgttcaaggctgccgcggcgaagaacggagcgtggggggagaaaccgcccatcagcccaccgagcacaggtcccgcgaccatcccgaacccgaaacaggcgctcatgaagccgaagtgccgcgcgcgctcatcgccatcagtgatatcggcaatataagcgccggctaccgccccagtcgccccggtgatgccggccacgatccgcccgatatagagaacccaaaggaaaggcgctgtcgccatgatggcgtagtcgacagtggcgccggccagcgagacgagcaagattggccgccgcccgaaacgatccgacagcgcgcccagcacaggtgcgcaggcaaattgcaccaacgcatacagcgccagcagaatgccatagtgggcggtgacgtcgttcgagtgaaccagatcgcgcaggaggcccggcagcaccggcataatcaggccgatgccgacagcgtcgagcgcgacagtgctcagaattacgatcaggggtatgttgggtttcacgtctggcctccggaccagcctccgctggtccgattgaacgcgcggattctttatcactgataagttggtggacatattatgtttatcagtgataaagtgtcaagcatgacaaagttgcagccgaatacagtgatccgtgccgccctggacctgttgaacgaggtcggcgtagacggtctgacgacacgcaaactggcggaacggttgggggttcagcagccggcgctttactggcacttcaggaacaagcgggcgctgctcgacgcactggccgaagccatgctggcggagaatcatacgcattcggtgccgagagccgacgacgactggcgctcatttctgatcgggaatgcccgcagcttcaggcaggcgctgctcgcctaccgcgatggcgcgcgcatccatgccggcacgcgaccgggcgcaccgcagatggaaacggccgacgcgcagcttcgcttcctctgcgaggcgggtttttcggccggggacgccgtcaatgcgctgatgacaatcagctacttcactgttggggccgtgcttgaggagcaggccggcgacagcgatgccggcgagcgcggcggcaccgttgaacaggctccgctctcgccgctgttgcgggccgcgatagacgccttcgacgaagccggtccggacgcagcgttcgagcagggactcgcggtgattgtcgatggattggcgaaaaggaggctcgttgtcaggaacgttgaaggaccgagaaagggtgacgattgatcaggaccgctgccggagcgcaacccactcactacagcagagccatgtagacaacatcccctccccctttccaccgcgtcagacgcccgtagcagcccgctacgggctttttcatgccctgccctagcgtccaagcctcacggccgcgctcggcctctctggcggccttctggcgctcctgctgcggcgtccgctcgtgggccgtggcgcgggtccgcgcgccggcctcgtgcgcctggcgctcgcgggcgaggtccagggcggccgtcttcacgttctgccttgcgcagatgagatagatcttggcagtcacagcatgcgcatatccatgcttcgaccatgcgctcacaaagtaggtgaatgcgcaatgtagtacccacatcgtcatcgctttccactgctctcgcgaataaagatggaaaatcaatctcatggtaatagtccatgaaaatccttgtattcataaatcctccaggtagctatatgcaaattgaaacaaaagagatggtgatctttctaagagatgatggaatctcccttcagtatcccgatggtcaatgcgctggatatgggatagatgggaatatgctgatttttatgggacagagttgcgaactgttcccaactaaaatcattttgcacgatcagcgcactacgaactttacccacaaatagtcaggtaatgaatcctgatataaagacaggttgataaatcagtcttctacgcgcatcgcacgcgcacaccgtagaaagtctttcagttgtgagcctgggcaaaccgttaactttcggcggctttgctgtgcgacaggctcacgtctaaaaggaaataaatcatgggtcataaaattatcacgttgtccggcgcggcgacggatgttctgtatgcgctgtttttccgtggcgcgttgctgtctggtgatctgccttctaaatctggcacagccgaattgcgcgagcttggttttgctgaaaccagacacacagcaactgaataccagaaagaaaatcactttacctttctgacatcagaagggcagaaatttgccgttgaacacctggtcaatacgcgttttggtgagcagcaatattgcgcttcgatgacgcttggcgttgagattgatacctctgctgcacaaaaggcaatcgacgagctggaccagcgcattcgtgacaccgtctccttcgaacaccaggtgtacgtacaccaccatcaccaccactaggcggccgccctcctcctcctttcttgttcctttcacgtcgccttctcggttgtagctggcagacgacgagtcttacttttacgtgtacttctctatagatgatgtatgatctctctgcatgcgtgttcgtgcatgtgtccgtgtgttgtgtacgcgtgcgtctcgcctcagctctccgcgtgaaagggtttgactgcccatgatgcgtgtgtatatccacgcgcaggcacgcacacacacacacacacacacacacacaggcacacacaggcacacaaacgcatctcaggccgagccgcatacgtctctcgcacggtctcgtttatttgatcatgtagttgagtattaaattgggaagacaaaaacataatagcacgaagagtcgggcacgaaaagcccgatctctctctctctctctcgtgcgcgcaggggcgtgtgggtgcacgacgacgaggacggaggggggaagggaggcataaacggatcgatcccccatcgcacatgcgggtacgagcattatctgctgtgtctggtcctttatcatatcgctacccgcccgccccccgcccccctcccccccccccccccgcggctcctgtcactgtcgttcctgcgactccccacacacccgcgcaacgctcatgtcacgaagagaaaagtagaaggcgtggcgatgcgttgcgcggccccctgtccgctggcatgcagacgtcgagccgtggaacggatggtagcgagagacaacgcggcgatgcaggaaaggagatttactgcaggacgtctacacacgcgcgcacaccactgcgaatggcaccgtgctgaggaaaattgggggggagggcgcacgggggcggggcaggaaacggttggatcagcagcactctcaacttgtgtccgtattgcgaaggagggagaggagcctgcccgtattatgggcgctgaaacgtcggaaccacctatgaatcccacttctgcgtcgcggaggcgtactgcttccgaccacctccgcagctcacgcgcgtcgagctccctccctttccccttctttccgttgtgtgtgtgtgtgtgtgtgtgtcttgtcacgatgcatggccatctctcctccaaccctccacgccttcctctcccccgcccatcaaacgcgctacggccacaaccatttcttcaagtatcacatccaccaccactcttacccacctaccctcttcgactctgacacagccactgacgccctctccgcctctctcgctcgctgcacattgactctccacagccccccctccctcgcacagccagccccacccacccacccacccacccaccgctctacacacctccacagcagccggatcctagtatgaagatttcggtgatccctgagcaggtggcggaaacattggatgctgagaaccatttcattgttcgtgaagtgttcgatgtgcacctatccgaccaaggctttgaactatctaccagaagtgtgagcccctaccggaaggattacatctcggatgatgactctgatgaagactctgcttgctatggcgcattcatcgaccaagagcttgtcgggaagattgaactcaactcaacatggaacgatctagcctctatcgaacacattgttgtgtcgcacacgcaccgaggcaaaggagtcgcgcacagtctcatcgaatttgcgaaaaagtgggcactaagcagacagctccttggcatacgattagagacacaaacgaacaatgtacctgcctgcaatttgtacgcaaaatgtggctttactctcggcggcattgacctgttcacgtataaaactagacctcaagtctcgaacgaaacagcgatgtactggtactggttctcgggagcacaggatgacgcctaactagcctcggagatccactagttctagttctaggggccgaattcagatcctcgtgtgagcgttcgcggaatcggtcgctcgtgtttatgcccgtcttggtgttgtgctcgcaaggcggtgcagcaggataccgtcgccctcctctctccttgcttctctgttcttcaattcgcgatctcacagaggccggctgtgcacgcccttcctcaccctccttttcccacctctcggccaccggtcggctccgttccgtctgccgtcgagaagggacgggcatgtgcagctcctccctttctctcgcgcgcgcatcttctcttgcttgtggcactcacgctcatgcgtcaaggcggccccacgccgagcccctgcgctcccttccctcttgcgcatccgtagcgcggatgccgtcgatgcgcaaggccggcatgaaggagcgcgtgccctcaagagggcacactatcatgccctacgtgggccacgcagcgatgaggccggcttcggcggagatgcgtcacgcacgtgccagatgatgcgctacgccttccttgacttgcgcccccctctcttcctccgtctctcactctctctctctcacacacacacacacacacacacacacacaatacgtacaccaggtgttcgaacttattcgcaatggagtgtcattcatcaaggacgccgctatcgcaaatggtgctatccacgcagcggcaatcgaaacacctcagccggtgaccaatatctacaacatcagccttggtatccagcgtgatgagccagcgcagaacaaggtaaccgtcagtgccgataagttcaaagttaaacctggtgttgataccaacattgaaacgttgatcgaaaacgcgctgaaaaacgctgctgaatgtgcggcgctggatgtcacaaagcaaatggcagcagacaagaaagcgatggatgaactggcttcctatgtccgcacggccatcatgatggaatgtttccccggtggtgttatctggcagcagtgccgtcgatagtatgcaattgataattattatcatttgcgggtcctttccggcgatccgccttgttacggggcggcgacctcgcgggttttcgctatttatgaaaattttccggtttaaggcgtttccgttcttcttcgtcataacttaatgtttttatttaaaataccctctgaaaagaaaggaaacgacaggtgctgaaagcgagctttttggcctctgtcgtttcctttctctgtttttgtccgtggaatgaacaatggaagtcaacaaaaagcagctggctgacattttcggtgcgagtatccgtaccattcagaactggcaggaacagggaatgcccgttctgcgaggcggtggcaagggtaatgaggtgctttatgactctgccgccgtcataaaatggtatgccgaaagggatgctgaaattgagaacgaaaagctgcgccgggaggttgaagaactgcggcaggccagcgaggcagatctagcgtggactcaaggctctcgcgaatggctcgcgttggaaactttcattgacacttgaggggcaccgcagggaaattctcgtccttgcgagaaccggctatgtcgtgctgcgcatcgagcctgcgcccttggcttgtctcgcccctctccgcgtcgctacggggcttccagcgcctttccgacgctcaccgggctggttgccctcgccgctgggctggcggccgtctatggccctgcaaacgcgccagaaacgccgtcgaagccgtgtgcgagacaccgcggccgccggcgttgtggatacctcgcggaaaacttggccctcactgacagatgaggggcggacgttgacacttgaggggccgactcacccggcgcggcgttgacagatgaggggcaggctcgatttcggccggcgacgtggagctggccagcctcgcaaatcggcgaaaacgcctgattttacgcgagtttcccacagatgatgtggacaagcctggggataagtgccctgcggtattgacacttgaggggcgcgactactgacagatgaggggcgcgatccttgacacttgaggggcagagtgctgacagatgaggggcgcacctattgacatttgaggggctgtccacaggcagaaaatccagcatttgcaagggtttccgcccgtttttcggccaccgctaacctgtcttttaacctgcttttaaaccaatatttataaaccttgtttttaaccagggctgcgccctgtgcgcgtgaccgcgcacgccgaaggggggtgcccccccttctcgaaccctcccggcccgctaacgcgggcctcccatccccccaggggctgcgcccctcggccgcgaacggcctcaccccaaaaatggcagcgctggcagtccttgccattgccgggatcggggcagtaacgggatgggcgatcagcccgagcgcgacgcccggaagcattgacgtgccgcaggtgctggcatcgacattcagcgaccaggtgccgggcagtgagggcggcggcctgggtggcggcctgcccttcacttcggccgtcggggcattcacggacttcatggcggggccggcaatttttaccttgggcattcttggcatagtggtcgcgggtgccgtgctcgtgttcgggggtgaattcacatgtgtgcaacaggaagagtttgtagaaacgcaaaaaggccatccgtcaggatggccttctgcttaatttgatgcctggcagtttatggcgggcgacgaatttcttctctcatccgccaaaacagtgcacggcgcgcctacgtacctcaggactagtcctcctaatctctagtagctagcataatccctaggactgagctagctatcagcttaaggagctcggatccacaggaagagtttgtagaaacgcaaaaaggccatccgtcaggatggccttctgcttaatttgatgcctggcagtttatggcgggcgacgaatttcttctctcatccgccaaaacagatccggccggccctcgaggcgatcgctatcgatcctcctaatctctagtagctagcattgtacctaggactgagctagccataaatctag

SEQ ID NO: 8 - DNA, 13812 bp, Artificial Sequence
  pLMTB6413
aattggcgcgcccgggactagtcttgggaattcagcgggttcgtgcgatccgtctgcatgatggtgatagccgtcagcatgattttcgtgtcgtcgaacttggtgaagggcattctcggcggcgatcacgacgccggccctgcggagccttcgccgcgtgcgcgattcatggcggccgtggaggccaaggatttcgcgcgagtgcaagagctgatcgaggcgcgtggagccaagtcggcggctgattatgtccttgcgcagctcgccgtggccgaaggtctggaccgcaagcctggtgcgcgcgtcgtggtcgggaaagcggcgggcagcatggcaatgccgcctgcggcgctgggttttacgccaaggggagaagcggcatacgccatcgagcggtcagcctatggtgagccgaggtccagcattgcgaagcagtaccagcaggaatggaaccggaaggcggcgacctggtgggcgatggccggtgtggccggcatcatcggcgcgatcctggcggcggcggcaaccggctttgttgggctggcagtgtcgatccgcaaccgagtgaagcgcgtgcgcgacctgttggtgatggagccgggtgcagagccataagcggcaagagacgaaagcccggtttccgggcttttgttttgttacgccaaggacgagttttagcggctaaaggtgttgacgtgcgagaaatgtttagctaaacttctctcatgtgctggcggctgtcaccgctatgttcaaccaaggcgcggagcaaattatgggtgttatccatgaagaaacggcttaccgaaagccagttccaggaggcgatccaggggctggaagtggggcagcagaccatcgagatagcgcggggcgtcttagtcgatgggaagccacaggcgacgttcgcaacgtcgctgggactgaccaggggcgcagtgtcgcaagcggtgcatcgcgtgtgggccgcgttcgaggacaagaacttgcccgaggggtacgcgcgggtaacggcggttctgccggaacatcaggcgtacatcgtccggaagtgggaagcggacgccaagaaaaaacaggaaaccaaacgatgaaaactttggtcacggccaaccagaaaggcggcgtcggcaagacttcgacccttgtgcatcttgccttcgactttttcgagcgcggcttgcgggttgccgtgatcgacctggacccccagggcaatgcgtcctacacgctcaaggactttgctaccggcctgcatgcaagcaagctgttcggcgctgtccctgccggcggctggaccgaaaccgcacccgcagccggcgacggccaggccgcgcgcctcgccctcatcgagtccaacccggtactggcgaacgccgaacggctgtcgctggacgacgcccgcgagctgttcggggcgaacatcaaggccctggcgaaccaaggcttcgacgtgtgcctgatcgacacggccccgacccttggcgtcggcctggcggccgccctcttcgcggccgactatgtgctgtcccccatcgagcttgaggcgtacagcatccagggcatcaagaagatggtcacgaccattgcgaacgtgcgccagaagaacgccaagctgcaattccttggcatggtgcccagcaaggtcgatgcgcggaatccgcgccacgcgcgccaccaagccgagctgctggccgcgtaccccaagatgatgattccggccaccgttggcctgcgcagcagcatcgccgatgccctcgcatccggtgtgccggtctggaagatcaagaaaacggccgcgcgcaaggcatcgaaagaggttcgcgccctggctgattacgtacctcaccgaccaggatgcggtcggggcgcatacgcagcgttgtcttgagcagcagcgtcatcgagacgtcgatgctggtgtggtattggacggcgttctctgcggcgcactggatttcgccggtgtcctcgatgatgacgacgcgctcagacgggttgaaggcgaccatttcattgatgatcgcgttgacgagcgtggtcttgcccgagccagtaccgccaatgacgaggatgtttcgatgcgccgcgacggcgcttttaatgacctcgtattgctcgcgggtcatgatgcccgcctcgacgtactgttccagcgtgaagatggcgaccgcgcgcttgcggatcgcaaaggttggcgcggccacgaccggcggcaattggccggcaaagcggctgccatccaaggggaactcgccttccaggatgggcgaatgccgcgtgacctctttgccgtggaatccggccaccgtttctataatcgcctgcgactggctgggccgcatgtcgcagatgtaccgcatcggctcgccaaggcgttcgtgccacaccttgccgtccgcgttgagcatgacttcaacggttttcgggtcgttgagcgcggccaacaggtccgcacccatgtcgcgttccagcttgcgcttggcccgctccttgatggtctgaaactcttctttcccgctcacttttcagtaacccctacgcaacaaatcattagcaacattatcgcacaggcaaacgatataccgaaagtgtttagcctgcaagacaaacagctaatcgaaccgcacgacgtaggggttctgatagaaaacaactgtcaaagcgcacccgcccgatgccattcgcggcacggcttccgttgaggatgtcgatatgatgcgcgagccgacggcccgcagagaaggggccgttttagcggctaaagaaggaagtgcaagccctaacccttggcgtcagagccttccacgcagcttttttcgggtgtcgtcgccccatttctttacgataaacgccttatgtgacggcaaaaccacactgatgcgttcgtatccgggcggcacgctgctcttgaaaggatgacccgcaatctccgcgagtgcctcgcggtcaaggtcggtggactccaggagaagaggtaggggagtttccagggcgtcggcaatggcctccatcaccttcaacgaggggttggccttaccgttggttaagtctgataaaaacgaaattgaaacccctgccctctccgacagctcatgtttcgtcatgccccgctcatcgagcagacgaaggatgttggtgaaaaatatctggttgtacacagcggaagccgcccctcgcacctttggtcgcggcccgcaaaattttagccgctaaagttcttgacagcggaaccaatgtttagctaaactagagtctcctttctcaaggagactttcgatatgagccataatcagttccagtttatcggtaatcttacccgtgacaccgaggtacgtcatggcaattctaacaagccgcaagcaattttcgatatagcggttaatgaagagtggcgcaacgatgccggcgacaagcaggagcgcaccgacttcttccgcatcaagtgttttggctctcaggccgaggcccacggcaagtatttgggcaaggggtcgctggtattcgtgcagggcaagattcggaataccaagtacgagaaggacggccagacggtctacgggaccgacttcattgccgataaggtggattatctggacaccaaggcaccaggcgggtcaaatcaggaataagggcacattgccccggcgtgagtcggggcaatcccgcaaggagggtgaatgaatcggacgttgaccggaaggcatacaggcaagaactgatcgacgcggggttttccgccgaggatgccgaaaccatcgcaagccgcaccgtcatgcgtgcgccccgcgaaaccttccagtccgtcggctcgatggtccagcaagctacggccaagatcgagcgcgacagcgtgcaactggctccccctgccctgcccgcgccatcggccgccgtggagcgttcgcgtcgtctcgaacaggaggcggcaggtttggcgaagtcgatgaccatcgacacgcgaggaactatgacgaccaagaagcgaaaaaccgccggcgaggacctggcaaaacaggtcagcgaggccaagcaggccgcgttgctgaaacacacgaagcagcagatcaaggaaatgcagctttccttgttcgatattgcgccgtggccggacacgatgcgagcgatgccaaacgacacggcccgctctgccctgttcaccacgcgcaacaagaaaatcccgcgcgaggcgctgcaaaacaaggtcattttccacgtcaacaaggacgtgaagatcacctacaccggcgtcgagctgcgggccgacgatgacgaactggtgtggcagcaggtgttggagtacgcgaagcgcacccctatcggcgagccgatcaccttcacgttctacgagctttgccaggacctgggctggtcgatcaatggccggtattacacgaaggccgaggaatgcctgtcgcgcctacaggcgacggcgatgggcttcacgtccgaccgcgttgggcacctggaatcggtgtcgctgctgcaccgcttccgcgtcctggaccgtggcaagaaaacgtcccgttgccaggtcctgatcgacgaggaaatcgtcgtgctgtttgctggcgaccactacacgaaattcatatgggagaagtaccgcaagctgtcgccgacggcccgacggatgttcgactatttcagctcgcaccgggagccgtacccgctcaagctggaaaccttccgcctcatgtgcggatcggattccacccgcgtgaagaagtggcgcgagcaggtcggcgaagcctgcgaagagttgcgaggcagcggcctggtggaacacgcctgggtcaatgatgacctggtgcattgcaaacgctagggccttgtggggtcagttccggctgggggttcagcagccagcgctttactggcatttcaggaacaagcgggcactgctcgacgcacttgcttcgctcagtatcgctcgggacgcacggcgcgctctacgaactgccgataaacagaggattaaaattgacaattgtgattaaggctcagattcgacggcttggagcggccgacgtgcaggatttccgcgagatccgattgtcggccctgaagaaagctccagagatgttcgggtccgtttacgagcacgaggagaaaaagcccatggaggcgttcgctgaacggttgcgagatgccgtggcattcggcgcctacatcgacggcgagatcattgggctgtcggtcttcaaacaggaggacggccccaaggacgctcacaaggcgcatctgtccggcgttttcgtggagcccgaacagcgaggccgaggggtcgccggtatgctgctgcgggcgttgccggcgggtttattgctcgtgatgatcgtccgacagattccaacgggaatctggtggatgcgcatcttcatcctcggcgcacttaatatttcgctattctggagcttgttgtttatttcggtctaccgcctgccgggcggggtcgcggcgacggtaggcgctgtgcagccgctgatggtcgtgttcatctctgccgctctgctaggtagcccgatacgattgatggcggtcctgggggctatttgcggaactgcgggcgtggcgctgttggtgttgacaccaaacgcagcgctagatcctgtcggcgtcgcagcgggcctggcgggggcggtttccatggcgttcggaaccgtgctgacccgcaagtggcaacctcccgtgcctctgctcacctttaccgcctggcaactggcggccggaggacttctgctcgttccagtagctttagtgtttgatccgccaatcccgatgcctacaggaaccaatgttctcggcctggcgtggctcggcctgatcggagcgggtttaacctacttcctttggttccgggggatctcgcgactcgaacctacagttgtttccttactgggctttctcagcccggggaccgccgtgttgctaggatggttgttcttggatcagacgctgagtgcgcttcaaatcatcggcgtcctgctcgtgatcgggagtatctggctgggccaacgttccaaccgcactcctagggcgcgtatagcttgccggaagtcgccttgacccgcatggcataggcctatcgtttccacgatcagcgatcggctcgttgccctgcgccgctccaaagcccgcgacgcagcgccggcaggcagagcaagtagagggcagcgcctgcaatccatgcccacccgttccacgttgttatagaagccgcatagatcgccgtgaagaggaggggtccgacgatcgaggtcaggctggtgagcgccgccagtgagccttgcagctgcccctgacgttcctcatccacctgcctggacaacattgcttgcagcgccggcattccgatgccacccgaagcaagcaggaccatgatcgggaacgccatccatccccgtgtcgcgaaggcaagcaggatgtagcctgtgccgtcggcaatcattccgagcatgagtgcccgcctttcgccgagccgggcggctacagggccggtgatcattgcctgggcgagtgaatgcagaatgccaaatgcggcaagcgaaatgccgatcgtggtcgcgtcccagtgaaagcgatcctcgccgaaaatgacccaaagcgcggccggcacctgtccgacaagttgcatgatgaagaagaccgccatcagggcggcgacgacggtcatgccccgggcccaccggaacgaagcgagcgggttgagagcctcccggcgtaacggccggcgttcgcctttgtgcgactccggcaaaaggaaacagcccgtcaggaaattgaggccgttcaaggctgccgcggcgaagaacggagcgtggggggagaaaccgcccatcagcccaccgagcacaggtcccgcgaccatcccgaacccgaaacaggcgctcatgaagccgaagtgccgcgcgcgctcatcgccatcagtgatatcggcaatataagcgccggctaccgccccagtcgccccggtgatgccggccacgatccgcccgatatagagaacccaaaggaaaggcgctgtcgccatgatggcgtagtcgacagtggcgccggccagcgagacgagcaagattggccgccgcccgaaacgatccgacagcgcgcccagcacaggtgcgcaggcaaattgcaccaacgcatacagcgccagcagaatgccatagtgggcggtgacgtcgttcgagtgaaccagatcgcgcaggaggcccggcagcaccggcataatcaggccgatgccgacagcgtcgagcgcgacagtgctcagaattacgatcaggggtatgttgggtttcacgtctggcctccggaccagcctccgctggtccgattgaacgcgcggattctttatcactgataagttggtggacatattatgtttatcagtgataaagtgtcaagcatgacaaagttgcagccgaatacagtgatccgtgccgccctggacctgttgaacgaggtcggcgtagacggtctgacgacacgcaaactggcggaacggttgggggttcagcagccggcgctttactggcacttcaggaacaagcgggcgctgctcgacgcactggccgaagccatgctggcggagaatcatacgcattcggtgccgagagccgacgacgactggcgctcatttctgatcgggaatgcccgcagcttcaggcaggcgctgctcgcctaccgcgatggcgcgcgcatccatgccggcacgcgaccgggcgcaccgcagatggaaacggccgacgcgcagcttcgcttcctctgcgaggcgggtttttcggccggggacgccgtcaatgcgctgatgacaatcagctacttcactgttggggccgtgcttgaggagcaggccggcgacagcgatgccggcgagcgcggcggcaccgttgaacaggctccgctctcgccgctgttgcgggccgcgatagacgccttcgacgaagccggtccggacgcagcgttcgagcagggactcgcggtgattgtcgatggattggcgaaaaggaggctcgttgtcaggaacgttgaaggaccgagaaagggtgacgattgatcaggaccgctgccggagcgcaacccactcactacagcagagccatgtagacaacatcccctccccctttccaccgcgtcagacgcccgtagcagcccgctacgggctttttcatgccctgccctagcgtccaagcctcacggccgcgctcggcctctctggcggccttctggcgctcctgctgcggcgtccgctcgtgggccgtggcgcgggtccgcgcgccggcctcgtgcgcctggcgctcgcgggcgaggtccagggcggccgtcttcacgttctgccttgcgcagatgagatagatcttggcagtcacagcatgcgcatatccatgcttcgaccatgcgctcacaaagtaggtgaatgcgcaatgtagtacccacatcgtcatcgctttccactgctctcgcgaataaagatggaaaatcaatctcatggtaatagtccatgaaaatccttgtattcataaatcctccaggtagctatatgcaaattgaaacaaaagagatggtgatctttctaagagatgatggaatctcccttcagtatcccgatggtcaatgcgctggatatgggatagatgggaatatgctgatttttatgggacagagttgcgaactgttcccaactaaaatcattttgcacgatcagcgcactacgaactttacccacaaatagtcaggtaatgaatcctgatataaagacaggttgataaatcagtcttctacgcgcatcgcacgcgcacaccgtagaaagtctttcagttgtgagcctgggcaaaccgttaactttcggcggctttgctgtgcgacaggctcacgtctaaaaggaaataaatcatgggtcataaaattatcacgttgtccggcgcggcgacggatgttctgtatgcgctgtttttccgtggcgcgttgctgtctggtgatctgccttctaaatctggcacagccgaattgcgcgagcttggttttgctgaaaccagacacacagcaactgaataccagaaagaaaatcactttacctttctgacatcagaagggcagaaatttgccgttgaacacctggtcaatacgcgttttggtgagcagcaatattgcgcttcgatgacgcttggcgttgagattgatacctctgctgcacaaaaggcaatcgacgagctggaccagcgcattcgtgacaccgtctccttcgaacaccaggtgtacgtacaccaccatcaccaccactaggcggccgccctcctcctcctttcttgttcctttcacgtcgccttctcggttgtagctggcagacgacgagtcttacttttacgtgtacttctctatagatgatgtatgatctctctgcatgcgtgttcgtgcatgtgtccgtgtgttgtgtacgcgtgcgtctcgcctcagctctccgcgtgaaagggtttgactgcccatgatgcgtgtgtatatccacgcgcaggcacgcacacacacacacacacacacacacacaggcacacacaggcacacaaacgcatctcaggccgagccgcatacgtctctcgcacggtctcgtttatttgatcatgtagttgagtattaaattgggaagacaaaaacataatagcacgaagagtcgggcacgaaaagcccgatctctctctctctctctcgtgcgcgcaggggcgtgtgggtgcacgacgacgaggacggaggggggaagggaggcataaacggatcgatcccccatcgcacatgcgggtacgagcattatctgctgtgtctggtcctttatcatatcgctacccgcccgccccccgcccccctcccccccccccccccgcggctcctgtcactgtcgttcctgcgactccccacacacccgcgcaacgctcatgtcacgaagagaaaagtagaaggcgtggcgatgcgttgcgcggccccctgtccgctggcatgcagacgtcgagccgtggaacggatggtagcgagagacaacgcggcgatgcaggaaaggagatttactgcaggacgtctacacacgcgcgcacaccactgcgaatggcaccgtgctgaggaaaattgggggggagggcgcacgggggcggggcaggaaacggttggatcagcagcactctcaacttgtgtccgtattgcgaaggagggagaggagcctgcccgtattatgggcgctgaaacgtcggaaccacctatgaatcccacttctgcgtcgcggaggcgtactgcttccgaccacctccgcagctcacgcgcgtcgagctccctccctttccccttctttccgttgtgtgtgtgtgtgtgtgtgtgtcttgtcacgatgcatggccatctctcctccaaccctccacgccttcctctcccccgcccatcaaacgcgctacggccacaaccatttcttcaagtatcacatccaccaccactcttacccacctaccctcttcgactctgacacagccactgacgccctctccgcctctctcgctcgctgcacattgactctccacagccccccctccctcgcacagccagccccacccacccacccacccacccaccgctctacacacctccacagcagccggatcctagtatgaagatttcggtgatccctgagcaggtggcggaaacattggatgctgagaaccatttcattgttcgtgaagtgttcgatgtgcacctatccgaccaaggctttgaactatctaccagaagtgtgagcccctaccggaaggattacatctcggatgatgactctgatgaagactctgcttgctatggcgcattcatcgaccaagagcttgtcgggaagattgaactcaactcaacatggaacgatctagcctctatcgaacacattgttgtgtcgcacacgcaccgaggcaaaggagtcgcgcacagtctcatcgaatttgcgaaaaagtgggcactaagcagacagctccttggcatacgattagagacacaaacgaacaatgtacctgcctgcaatttgtacgcaaaatgtggctttactctcggcggcattgacctgttcacgtataaaactagacctcaagtctcgaacgaaacagcgatgtactggtactggttctcgggagcacaggatgacgcctaactagcctcggagatccactagttctagttctaggggccgaattcagatcctcgtgtgagcgttcgcggaatcggtcgctcgtgtttatgcccgtcttggtgttgtgctcgcaaggcggtgcagcaggataccgtcgccctcctctctccttgcttctctgttcttcaattcgcgatctcacagaggccggctgtgcacgcccttcctcaccctccttttcccacctctcggccaccggtcggctccgttccgtctgccgtcgagaagggacgggcatgtgcagctcctccctttctctcgcgcgcgcatcttctcttgcttgtggcactcacgctcatgcgtcaaggcggccccacgccgagcccctgcgctcccttccctcttgcgcatccgtagcgcggatgccgtcgatgcgcaaggccggcatgaaggagcgcgtgccctcaagagggcacactatcatgccctacgtgggccacgcagcgatgaggccggcttcggcggagatgcgtcacgcacgtgccagatgatgcgctacgccttccttgacttgcgcccccctctcttcctccgtctctcactctctctctctcacacacacacacacacacacacacacacaatacgtacaccaggtgttcgaacttattcgcaatggagtgtcattcatcaaggacgccgctatcgcaaatggtgctatccacgcagcggcaatcgaaacacctcagccggtgaccaatatctacaacatcagccttggtatccagcgtgatgagccagcgcagaacaaggtaaccgtcagtgccgataagttcaaagttaaacctggtgttgataccaacattgaaacgttgatcgaaaacgcgctgaaaaacgctgctgaatgtgcggcgctggatgtcacaaagcaaatggcagcagacaagaaagcgatggatgaactggcttcctatgtccgcacggccatcatgatggaatgtttccccggtggtgttatctggcagcagtgccgtcgatagtatgcaattgataattattatcatttgcgggtcctttccggcgatccgccttgttacggggcggcgacctcgcgggttttcgctatttatgaaaattttccggtttaaggcgtttccgttcttcttcgtcataacttaatgtttttatttaaaataccctctgaaaagaaaggaaacgacaggtgctgaaagcgagctttttggcctctgtcgtttcctttctctgtttttgtccgtggaatgaacaatggaagtcaacaaaaagcagctggctgacattttcggtgcgagtatccgtaccattcagaactggcaggaacagggaatgcccgttctgcgaggcggtggcaagggtaatgaggtgctttatgactctgccgccgtcataaaatggtatgccgaaagggatgctgaaattgagaacgaaaagctgcgccgggaggttgaagaactgcggcaggccagcgaggcagatctagcgtggaytcaagrmtctcgcgaatggctcgcgtyggaractttcattgwcacttgaggggcaccgcagggaaattctcgtccttgcgagaaccggctatgtcgtgctgcgcatcgagcctgcgcccttggcttgtctcgcccctctccgcgtcgctacggggcttccagcgcctttccgacgctcaccgggctggttgccctcgccgctgggctggcggccgtctatggccctgcaaacgcgccagaaacgccgtcgaagccgtgtgcgagacaccgcggccgccggcgttgtggatacctcgcggaaaacttggccctcactgacagatgaggggcggacgttgacacttgaggggccgactcacccggcgcggcgttgacagatgaggggcaggctcgatttcggccggcgacgtggagctggccagcctcgcaaatcggcgaaaacgcctgattttacgcgagtttcccacagatgatgtggacaagcctggggataagtgccctgcggtattgacacttgaggggcgcgactactgacagatgaggggcgcgatccttgacacttgaggggcagagtgctgacagatgaggggcgcacctattgacatttgaggggctgtccacaggcagaaaatccagcatttgcaagggtttccgcccgtttttcggccaccgctaacctgtcttttaacctgcttttaaaccaatatttataaaccttgtttttaaccagggctgcgccctgtgcgcgtgaccgcgcacgccgaaggggggtgcccccccttctcgaaccctcccggcccgctaacgcgggcctcccatccccccaggggctgcgcccctcggccgcgaacggcctcaccccaaaaatggcagcgctggcagtccttgccattgccgggatcggggcagtaacgggatgggcgatcagcccgagcgcgacgcccggaagcattgacgtgccgcaggtgctggcatcgacattcagcgaccaggtgccgggcagtgagggcggcggcctgggtggcggcctgcccttcacttcggccgtcggggcattcacggacttcatggcggggccggcaatttttaccttgggcattcttggcatagtggtcgcgggtgccgtgctcgtgttcgggggtg

SEQ ID NO: 9 - DNA, 4273 bp, Artificial Sequence
  pLMTB6807
tcgcgcgtttcggtgatgacggtgaaaacctctgacacatgcagctcccggagacggtcacagcttgtctgtaagcggatgccgggagcagacaagcccgtcagggcgcgtcagcgggtgttggcgggtgtcggggctggcttaactatgcggcatcagagcagattgtactgagagtgcaccatatgcggtgtgaaataccgcacagatgcgtaaggagaaaataccgcatcaggcgccattcgccattcaggctgcgcaactgttgggaagggcgatcggtgcgggcctcttcgctattacgccagctggcgaaagggggatgtgctgcaaggcgattaagttgggtaacgccagggttttcccagtcacgacgttgtaaaacgacggccagtgaattgacgcgtattgggatatttaaatggtacccacacgggcaggcgcacgctcctctctcttcagggagcgccgccccgctggtgtcattggacgagcatccgccgcgcatctcttcacccctcacccctcatccctctcccctctccccgcacacacacgcagtccttcgctttcactcttcgaacaaacacctcaaccatcttatcacctttctctcttccttgtcaaccatgcggttccggatctataagcggaaggtcctgatcctgaccctggtcgtcgccgcctgcggcttcgtcctgtggtcctccaacggccggcagcggaagaacgacgccctggccccccccctgctggactccgagcccctgcggggcgccggccacttcgccgcctccgtcggcatccggcgggtctccaacgactccgccgcccccctggtccccgccgtcccccggcccgaggtcgacaacctgaccctgcggtatcggtccctggtctatcagctgaacttcgaccagatgctgcggaacgtcgacaaggacggcacctggtcccccggcgagctggtcctggtcgtccaggtccacaaccggcccgagtatctgcggctgctgatcgactccctgcggaaggcccagggcatccgggaggtcctggtcatcttctcccacgacttctggtccgccgagatcaactccctgatctcctccgtcgacttctgccccgtcctgcaggtcttcttccccttctccatccagctgtatccctccgagttccccggctccgacccccgggactgcccccgggacctgaagaagaacgccgccctgaagctgggctgcatcaacgccgagtatcccgactccttcggccactatcgggaggccaagttctcccagaccaagcaccactggtggtggaagctgcacttcgtctgggagcgggtcaaggtcctgcaggactataccggcctgatcctgttcctggaggaggaccactatctggcccccgacttctatcacgtcttcaagaagatgtggaagctgaagcagcaggagtgccccggctgcgacgtcctgtccctgggcacctataccaccatccggtccttctatggcatcgccgacaaggtcgacgtcaagacctggaagtccaccgagcacaacatgggcctggccctgacccgggacgcctatcagaagctgatcgagtgcaccgacaccttctgcacctatgacgactataactgggactggaccctgcagtatctgaccctggcctgcctgcccaaggtctggaaggtcctggtcccccaggccccccggatcttccacgccggcgactgcggcatgcaccacaagaagacctgccggccctccacccagtccgcccagatcgagtccctgctgaacaacaacaagcagtatctgttccccgagaccctggtcatcggcgagaagttccccatggccgccatctcccccccccggaagaacggcggctggggcgacatccgggaccacgagctgtgcaagtcctatcggcggctgcaggcgggagcgtatccttatgacgtccctgattacgcatatccttatgacgtccctgattacgcatatccttatgacgtccctgattacgcataaggtaccatttaaatatcccaatggcgcgccgagcttggctcgagcatggtcatagctgtttcctgtgtgaaattgttatccgctcacaattccacacaacatacgagccggaagcataaagtgtaaagcctggggtgcctaatgagtgagctaactcacattaattgcgttgcgctcactgcccgctttccagtcgggaaacctgtcgtgccagctgcattaatgaatcggccaacgcgcggggagaggcggtttgcgtattgggcgctcttccgcttcctcgctcactgactcgctgcgctcggtcgttcggctgcggcgagcggtatcagctcactcaaaggcggtaatacggttatccacagaatcaggggataacgcaggaaagaacatgtgagcaaaaggccagcaaaaggccaggaaccgtaaaaaggccgcgttgctggcgtttttccataggctccgcccccctgacgagcatcacaaaaatcgacgctcaagtcagaggtggcgaaacccgacaggactataaagataccaggcgtttccccctggaagctccctcgtgcgctctcctgttccgaccctgccgcttaccggatacctgtccgcctttctcccttcgggaagcgtggcgctttctcatagctcacgctgtaggtatctcagttcggtgtaggtcgttcgctccaagctgggctgtgtgcacgaaccccccgttcagcccgaccgctgcgccttatccggtaactatcgtcttgagtccaacccggtaagacacgacttatcgccactggcagcagccactggtaacaggattagcagagcgaggtatgtaggcggtgctacagagttcttgaagtggtggcctaactacggctacactagaagaacagtatttggtatctgcgctctgctgaagccagttaccttcggaaaaagagttggtagctcttgatccggcaaacaaaccaccgctggtagcggtggtttttttgtttgcaagcagcagattacgcgcagaaaaaaaggatctcaagaagatcctttgatcttttctacggggtctgacgctcagtggaacgaaaactcacgttaagggattttggtcatgagattatcaaaaaggatcttcacctagatccttttaaattaaaaatgaagttttaaatcaatctaaagtatatatgagtaaacttggtctgacagttagaaaaactcatcgagcatcaaatgaaactgcaatttattcatatcaggattatcaataccatatttttgaaaaagccgtttctgtaatgaaggagaaaactcaccgaggcagttccataggatggcaagatcctggtatcggtctgcgattccgactcgtccaacatcaatacaacctattaatttcccctcgtcaaaaataaggttatcaagtgagaaatcaccatgagtgacgactgaatccggtgagaatggcaaaagtttatgcatttctttccagacttgttcaacaggccagccattacgctcgtcatcaaaatcactcgcatcaaccaaaccgttattcattcgtgattgcgcctgagcgagacgaaatacgcgatcgctgttaaaaggacaattacaaacaggaatcgaatgcaaccggcgcaggaacactgccagcgcatcaacaatattttcacctgaatcaggatattcttctaatacctggaatgctgttttcccagggatcgcagtggtgagtaaccatgcatcatcaggagtacggataaaatgcttgatggtcggaagaggcataaattccgtcagccagtttagtctgaccatctcatctgtaacatcattggcaacgctacctttgccatgtttcagaaacaactctggcgcatcgggcttcccatacaatcgatagattgtcgcacctgattgcccgacattatcgcgagcccatttatacccatataaatcagcatccatgttggaatttaatcgcggcctagagcaagacgtttcccgttgaatatggctcatactcttcctttttcaatattattgaagcatttatcagggttattgtctcatgagcggatacatatttgaatgtatttagaaaaataaacaaataggggttccgcgcacatttccccgaaaagtgccacctgacgtctaagaaaccattattatcatgacattaacctataaaaataggcgtatcacgaggccctttcgtc

SEQ ID NO: 10 - DNA, 4075 bp, Artificial Sequence
  pLMTB6808
tcgcgcgtttcggtgatgacggtgaaaacctctgacacatgcagctcccggagacggtcacagcttgtctgtaagcggatgccgggagcagacaagcccgtcagggcgcgtcagcgggtgttggcgggtgtcggggctggcttaactatgcggcatcagagcagattgtactgagagtgcaccatatgcggtgtgaaataccgcacagatgcgtaaggagaaaataccgcatcaggcgccattcgccattcaggctgcgcaactgttgggaagggcgatcggtgcgggcctcttcgctattacgccagctggcgaaagggggatgtgctgcaaggcgattaagttgggtaacgccagggttttcccagtcacgacgttgtaaaacgacggccagtgaattgacgcgtattgggatatttaaatggtacccacacgggcaggcgcacgctcctctctcttcagggagcgccgccccgctggtgtcattggacgagcatccgccgcgcatctcttcacccctcacccctcatccctctcccctctccccgcacacacacgcagtccttcgctttcactcttcgaacaaacacctcaaccatcttatcacctttctctcttccttgtcaaccatgcgcctgcgcgagccgctgctgagcggcagcgcggcgatgccgggcgcgagcctgcagcgcgcgtgccgcctgctggtggcggtgtgcgcgctgcacctgggcgtgacgctggtgtactacctggcgggccgcgacctgagccgcctgccgcagctggtgggcgtgagcacgccgctgcagggcggcagcaacagcgcggcggcgatcggccagagcagcggcgagctgcgcacgggcggcgcgcgcccgccgccgccgctgggcgcgagcagccagccgcgcccgggcggcgacagcagcccggtggtggacagcggcccgggcccggcgagcaacctgacgagcgtgccggtgccgcacacgacggcgctgagcctgccggcgtgcccggaggagagcccgctgctggtgggcccgatgctgatcgagttcaacatgccggtggacctggagctggtggcgaagcagaacccgaacgtgaagatgggtggtcgttacgcgccgcgcgactgcgtgagcccgcacaaggtggcgatcatcatcccgttccgcaaccgccaggagcacctgaagtactggctgtactacctgcacccggtgctgcagcgccagcagctggactacggcatctacgtgatcaaccaggcgggcgacacgatcttcaaccgcgcgaagctgctgaacgtgggcttccaggaggcgctgaaggactacgactacacgtgcttcgtgttcagcgacgtggacctgatcccgatgaacgaccacaacgcgtaccgctgcttcagccagccgcgccacatcagcgtggcgatggacaagttcggcttcagcctgccgtacgtgcagtacttcggcggcgtgagcgcgctgagcaagcagcagttcctgacgatcaacggcttcccgaacaactactggggctggggcggcgaggacgacgacatcttcaaccgcctggtgttccgcggcatgagcatcagccgcccgaacgcggtggtgggccgctgccgcatgatccgccacagccgcgacaagaagaacgagccgaacccgcagcgcttcgaccgcatcgcgcacacgaaggagacgatgctgagcgacggcctgaacagcctgacgtaccaggtgctggacgtgcagcgctacccgctgtacacgcagatcacggtggacatcggcacgccgagctggtcccacccgcagttcgagaagtaaggtaccatttaaatatcccaatggcgcgccgagcttggctcgagcatggtcatagctgtttcctgtgtgaaattgttatccgctcacaattccacacaacatacgagccggaagcataaagtgtaaagcctggggtgcctaatgagtgagctaactcacattaattgcgttgcgctcactgcccgctttccagtcgggaaacctgtcgtgccagctgcattaatgaatcggccaacgcgcggggagaggcggtttgcgtattgggcgctcttccgcttcctcgctcactgactcgctgcgctcggtcgttcggctgcggcgagcggtatcagctcactcaaaggcggtaatacggttatccacagaatcaggggataacgcaggaaagaacatgtgagcaaaaggccagcaaaaggccaggaaccgtaaaaaggccgcgttgctggcgtttttccataggctccgcccccctgacgagcatcacaaaaatcgacgctcaagtcagaggtggcgaaacccgacaggactataaagataccaggcgtttccccctggaagctccctcgtgcgctctcctgttccgaccctgccgcttaccggatacctgtccgcctttctcccttcgggaagcgtggcgctttctcatagctcacgctgtaggtatctcagttcggtgtaggtcgttcgctccaagctgggctgtgtgcacgaaccccccgttcagcccgaccgctgcgccttatccggtaactatcgtcttgagtccaacccggtaagacacgacttatcgccactggcagcagccactggtaacaggattagcagagcgaggtatgtaggcggtgctacagagttcttgaagtggtggcctaactacggctacactagaagaacagtatttggtatctgcgctctgctgaagccagttaccttcggaaaaagagttggtagctcttgatccggcaaacaaaccaccgctggtagcggtggtttttttgtttgcaagcagcagattacgcgcagaaaaaaaggatctcaagaagatcctttgatcttttctacggggtctgacgctcagtggaacgaaaactcacgttaagggattttggtcatgagattatcaaaaaggatcttcacctagatccttttaaattaaaaatgaagttttaaatcaatctaaagtatatatgagtaaacttggtctgacagttagaaaaactcatcgagcatcaaatgaaactgcaatttattcatatcaggattatcaataccatatttttgaaaaagccgtttctgtaatgaaggagaaaactcaccgaggcagttccataggatggcaagatcctggtatcggtctgcgattccgactcgtccaacatcaatacaacctattaatttcccctcgtcaaaaataaggttatcaagtgagaaatcaccatgagtgacgactgaatccggtgagaatggcaaaagtttatgcatttctttccagacttgttcaacaggccagccattacgctcgtcatcaaaatcactcgcatcaaccaaaccgttattcattcgtgattgcgcctgagcgagacgaaatacgcgatcgctgttaaaaggacaattacaaacaggaatcgaatgcaaccggcgcaggaacactgccagcgcatcaacaatattttcacctgaatcaggatattcttctaatacctggaatgctgttttcccagggatcgcagtggtgagtaaccatgcatcatcaggagtacggataaaatgcttgatggtcggaagaggcataaattccgtcagccagtttagtctgaccatctcatctgtaacatcattggcaacgctacctttgccatgtttcagaaacaactctggcgcatcgggcttcccatacaatcgatagattgtcgcacctgattgcccgacattatcgcgagcccatttatacccatataaatcagcatccatgttggaatttaatcgcggcctagagcaagacgtttcccgttgaatatggctcatactcttcctttttcaatattattgaagcatttatcagggttattgtctcatgagcggatacatatttgaatgtatttagaaaaataaacaaataggggttccgcgcacatttccccgaaaagtgccacctgacgtctaagaaaccattattatcatgacattaacctataaaaataggcgtatcacgaggccctttcgtc

SEQ ID NO: 11 - DNA, 4320 bp, Artificial Sequence
  pLMTB6811
tcgcgcgtttcggtgatgacggtgaaaacctctgacacatgcagctcccggagacggtcacagcttgtctgtaagcggatgccgggagcagacaagcccgtcagggcgcgtcagcgggtgttggcgggtgtcggggctggcttaactatgcggcatcagagcagattgtactgagagtgcaccatatgcggtgtgaaataccgcacagatgcgtaaggagaaaataccgcatcaggcgccattcgccattcaggctgcgcaactgttgggaagggcgatcggtgcgggcctcttcgctattacgccagctggcgaaagggggatgtgctgcaaggcgattaagttgggtaacgccagggttttcccagtcacgacgttgtaaaacgacggccagtgaattgacgcgtattgggatatttaaatggtaccgctccggccccttccgggtccagtattcctcccgggactccttcaaggtcctggcccggaacctgggcgtcatggacgacctgaagtccggcgtcccccgggccggctatcggggcgtcgtctccttcatctcccggggccggcggatctatctggccccccccgagggctggaccaagtatgacgtctcctggtcctaagagacaaacgtggcggatgtgatgttttcagtttacttcgcctcttttcgttttcctttcaggcgacttcccttttgagttttcgtgtatgcaattgttgctgttctactgtgcagttgtcaccagcgccgcttttgggcttgtggcgtcggtgattctgcctacgtgattcttctccacgttaaccacacgtgttattgcccttcgcttttgcgtgcgcggtctgggcagccactaggtataggggtgtggtggagtgcacccgtgacggtgacatcccttcgacccgcgtctgctgcctcagacgttcgtggagagctgacatgtcgacatccctttggtgtgagcatttgtgagcgtgtgggtgtttagtgtttttgttaccggttttgttgcgcttgtgtgctctagtagtgtttgtgcgcgtgcgtggggcactatgaagcaagctgcggtagatgcgctgcgtggggtggtaggctgcaggactacaaccattaagattcctctctctctccttggctcgctctacattgaccctctgcggtggtctgcttctctacaatcgatatgcccgacacctcccgttgtgtgttcgttctcctttatcactaggccattgcattcggccctgttgatgtggctacggtcttagacacgcacaaatggtttgcattatttatcggccatggtgtgtgtcacactcgcttgattgattttgttctgatgtgcagcatgaaatgtcgggagaataaaacatagtgccttcatcataggatgacggatgcttgaatccgtctttgtcttctgaacaactctctgcagagggcgcgggtggctgacttctctcccccttcgtatggcgaaaggatggctttggcgtccttccgggcttcgcgcgcataggggagcagaatatgtgctgcaaagaagacgcctggcggctgcgtgcgtgcgtacgtgtgagtgtgtgtgtgtgtgagggctacgctgccggcaccactactcgtgcctatcttcaccaccttctcgttctcctccgtcttctcttttgcctggtgagcatttgtgttcaccatacctcaacgcgcttcgcatagctgcccaacctcctactactctgtttggctaatctcagctcgttagtttctctcgttaatcataacgagtttgcccctcccccccattgtgtgtgtgtgtcttgtaaaaaaaaaaaaaaaacattatcttctacctttccgcgcctcacatccgcatctttcgtgtgctgcccactcaccatcaccggcctccttcgttggcagagcaacatttgttcatgagcagctctccgtactgtgtgtgtgcccactagccggtgcagagtaggagccgcgcttttgttgttgtacgtatcttttgacgtgggtgtgcgtgcaagcaaggatctacgcgcaacaagtagcaggcaagcggatctgttcgccggtaccatttaaatatcccaatggcgcgccgagcttggctcgagcatggtcatagctgtttcctgtgtgaaattgttatccgctcacaattccacacaacatacgagccggaagcataaagtgtaaagcctggggtgcctaatgagtgagctaactcacattaattgcgttgcgctcactgcccgctttccagtcgggaaacctgtcgtgccagctgcattaatgaatcggccaacgcgcggggagaggcggtttgcgtattgggcgctcttccgcttcctcgctcactgactcgctgcgctcggtcgttcggctgcggcgagcggtatcagctcactcaaaggcggtaatacggttatccacagaatcaggggataacgcaggaaagaacatgtgagcaaaaggccagcaaaaggccaggaaccgtaaaaaggccgcgttgctggcgtttttccataggctccgcccccctgacgagcatcacaaaaatcgacgctcaagtcagaggtggcgaaacccgacaggactataaagataccaggcgtttccccctggaagctccctcgtgcgctctcctgttccgaccctgccgcttaccggatacctgtccgcctttctcccttcgggaagcgtggcgctttctcatagctcacgctgtaggtatctcagttcggtgtaggtcgttcgctccaagctgggctgtgtgcacgaaccccccgttcagcccgaccgctgcgccttatccggtaactatcgtcttgagtccaacccggtaagacacgacttatcgccactggcagcagccactggtaacaggattagcagagcgaggtatgtaggcggtgctacagagttcttgaagtggtggcctaactacggctacactagaagaacagtatttggtatctgcgctctgctgaagccagttaccttcggaaaaagagttggtagctcttgatccggcaaacaaaccaccgctggtagcggtggtttttttgtttgcaagcagcagattacgcgcagaaaaaaaggatctcaagaagatcctttgatcttttctacggggtctgacgctcagtggaacgaaaactcacgttaagggattttggtcatgagattatcaaaaaggatcttcacctagatccttttaaattaaaaatgaagttttaaatcaatctaaagtatatatgagtaaacttggtctgacagttagaaaaactcatcgagcatcaaatgaaactgcaatttattcatatcaggattatcaataccatatttttgaaaaagccgtttctgtaatgaaggagaaaactcaccgaggcagttccataggatggcaagatcctggtatcggtctgcgattccgactcgtccaacatcaatacaacctattaatttcccctcgtcaaaaataaggttatcaagtgagaaatcaccatgagtgacgactgaatccggtgagaatggcaaaagtttatgcatttctttccagacttgttcaacaggccagccattacgctcgtcatcaaaatcactcgcatcaaccaaaccgttattcattcgtgattgcgcctgagcgagacgaaatacgcgatcgctgttaaaaggacaattacaaacaggaatcgaatgcaaccggcgcaggaacactgccagcgcatcaacaatattttcacctgaatcaggatattcttctaatacctggaatgctgttttcccagggatcgcagtggtgagtaaccatgcatcatcaggagtacggataaaatgcttgatggtcggaagaggcataaattccgtcagccagtttagtctgaccatctcatctgtaacatcattggcaacgctacctttgccatgtttcagaaacaactctggcgcatcgggcttcccatacaatcgatagattgtcgcacctgattgcccgacattatcgcgagcccatttatacccatataaatcagcatccatgttggaatttaatcgcggcctagagcaagacgtttcccgttgaatatggctcatactcttcctttttcaatattattgaagcatttatcagggttattgtctcatgagcggatacatatttgaatgtatttagaaaaataaacaaataggggttccgcgcacatttccccgaaaagtgccacctgacgtctaagaaaccattattatcatgacattaacctataaaaataggcgtatcacgaggccctttcgtc

SEQ ID NO: 12 - DNA, 4219 bp, Artificial Sequence
  pLMTB6816
tcgcgcgtttcggtgatgacggtgaaaacctctgacacatgcagctcccggagacggtcacagcttgtctgtaagcggatgccgggagcagacaagcccgtcagggcgcgtcagcgggtgttggcgggtgtcggggctggcttaactatgcggcatcagagcagattgtactgagagtgcaccatatgcggtgtgaaataccgcacagatgcgtaaggagaaaataccgcatcaggcgccattcgccattcaggctgcgcaactgttgggaagggcgatcggtgcgggcctcttcgctattacgccagctggcgaaagggggatgtgctgcaaggcgattaagttgggtaacgccagggttttcccagtcacgacgttgtaaaacgacggccagtgaattgacgcgtattgggatatttaaatggtaccgctgcccactcaccatcaccggcctccttcgttggcagagcaacatttgttcatgagcagctctccgtactgtgtgtgtgcccactagccggtgcagagtaggagccgcgcttttgttgttgtacgtatcttttgacgtgggtgtgcgtgcaagcaaggatctacgcgcaacaagtagcaggcaagcggatctgttcgccatgcggctcaacgtcaagaaggcgctcatcttcgtcggctgcgtggtcttcctctgggtcctgctctcgtacgcgagcgtgattgaggtgccgcgcgcggtcccgcagaaggacccggccgtggagatcgagaagaaaatcattaagctgcaaaagcaggtggacgcccagatggccgagagcaaatcgctgctggcgaaggtcaagaagctgaagaagattagcgagggcgagaacgtgggtggcgaagaggacagcctgaaggactcggaggtgatgcagcacctgtcgcagccgatcctgccggtcctcgtcatcgcgtgtgaccgggtgaccgtccagcgctgcctggacaacctcgtcaagttccgccccagcaaggagacgttcccgatcattgtgagccaagactgtggccacaacgccacctacgaagtgatcacgagctacacggcgagcgacccgacgatcagcgtggtgcgccaaccggacctcagcgagatcgtgctgccccgcgtgaaggtgaagttccggggctactacaagatcgcccgccactataagttcgcgctgaaccacgtctttgagacgctgggccatgaagcggtgatcattgtggaggatgacctggacatctcgccggacttcttcgagtactttctcggcacgtacccgctgctgctgaaggatccgagcctgtggtgcatctcggcgtggaacgacaacggcaagatggaggtcattgatatgtcgcgccccgacctcctccatcgcacggacttcttcccgggcctcggttgggtcctccggcgcgaaatgtggcgcaagctggcgccgaagtggcccacggccttcttcgacgactggctgcgcaacccggtgaatatcgacggcaaggcctgcatccgcccggagatcagccgcacgtacagcttcggcaaggtcggcgtgagcaagggcctgttctttgacctccatctgcgcaacatccagctcaacatggagtacgtggagttcacgaagctgaacctgacgtacctcctgaaggagcactacgacgacgcgctggtgagcacggtgtacaacctgccggaaatgtcggcgagcgaggtggtggcgggcagcgacctgagcgccgacccggtgcgcgtcatgtactcgaacgcgaagacctaccagcgcgccgccaagaagctcggcctgatggacgatttccgctcgggcgtgccgcgcacggcgtatcgcggcattgtgacgtgctttatccggggccgccgcgtgtatctcgccccgagcttcgagtggaacaagtacgatcccacgtggggtgcgggcgcctggagccatccgcagttcgagaagtgaggtaccatttaaatatcccaatggcgcgccgagcttggctcgagcatggtcatagctgtttcctgtgtgaaattgttatccgctcacaattccacacaacatacgagccggaagcataaagtgtaaagcctggggtgcctaatgagtgagctaactcacattaattgcgttgcgctcactgcccgctttccagtcgggaaacctgtcgtgccagctgcattaatgaatcggccaacgcgcggggagaggcggtttgcgtattgggcgctcttccgcttcctcgctcactgactcgctgcgctcggtcgttcggctgcggcgagcggtatcagctcactcaaaggcggtaatacggttatccacagaatcaggggataacgcaggaaagaacatgtgagcaaaaggccagcaaaaggccaggaaccgtaaaaaggccgcgttgctggcgtttttccataggctccgcccccctgacgagcatcacaaaaatcgacgctcaagtcagaggtggcgaaacccgacaggactataaagataccaggcgtttccccctggaagctccctcgtgcgctctcctgttccgaccctgccgcttaccggatacctgtccgcctttctcccttcgggaagcgtggcgctttctcatagctcacgctgtaggtatctcagttcggtgtaggtcgttcgctccaagctgggctgtgtgcacgaaccccccgttcagcccgaccgctgcgccttatccggtaactatcgtcttgagtccaacccggtaagacacgacttatcgccactggcagcagccactggtaacaggattagcagagcgaggtatgtaggcggtgctacagagttcttgaagtggtggcctaactacggctacactagaagaacagtatttggtatctgcgctctgctgaagccagttaccttcggaaaaagagttggtagctcttgatccggcaaacaaaccaccgctggtagcggtggtttttttgtttgcaagcagcagattacgcgcagaaaaaaaggatctcaagaagatcctttgatcttttctacggggtctgacgctcagtggaacgaaaactcacgttaagggattttggtcatgagattatcaaaaaggatcttcacctagatccttttaaattaaaaatgaagttttaaatcaatctaaagtatatatgagtaaacttggtctgacagttagaaaaactcatcgagcatcaaatgaaactgcaatttattcatatcaggattatcaataccatatttttgaaaaagccgtttctgtaatgaaggagaaaactcaccgaggcagttccataggatggcaagatcctggtatcggtctgcgattccgactcgtccaacatcaatacaacctattaatttcccctcgtcaaaaataaggttatcaagtgagaaatcaccatgagtgacgactgaatccggtgagaatggcaaaagtttatgcatttctttccagacttgttcaacaggccagccattacgctcgtcatcaaaatcactcgcatcaaccaaaccgttattcattcgtgattgcgcctgagcgagacgaaatacgcgatcgctgttaaaaggacaattacaaacaggaatcgaatgcaaccggcgcaggaacactgccagcgcatcaacaatattttcacctgaatcaggatattcttctaatacctggaatgctgttttcccagggatcgcagtggtgagtaaccatgcatcatcaggagtacggataaaatgcttgatggtcggaagaggcataaattccgtcagccagtttagtctgaccatctcatctgtaacatcattggcaacgctacctttgccatgtttcagaaacaactctggcgcatcgggcttcccatacaatcgatagattgtcgcacctgattgcccgacattatcgcgagcccatttatacccatataaatcagcatccatgttggaatttaatcgcggcctagagcaagacgtttcccgttgaatatggctcatactcttcctttttcaatattattgaagcatttatcagggttattgtctcatgagcggatacatatttgaatgtatttagaaaaataaacaaataggggttccgcgcacatttccccgaaaagtgccacctgacgtctaagaaaccattattatcatgacattaacctataaaaataggcgtatcacgaggccctttcgtc

SEQ ID NO: 13 - DNA, 4995 bp, Artificial Sequence
  pLMTB6848
tcgcgcgtttcggtgatgacggtgaaaacctctgacacatgcagctcccggagacggtcacagcttgtctgtaagcggatgccgggagcagacaagcccgtcagggcgcgtcagcgggtgttggcgggtgtcggggctggcttaactatgcggcatcagagcagattgtactgagagtgcaccatatgcggtgtgaaataccgcacagatgcgtaaggagaaaataccgcatcaggcgccattcgccattcaggctgcgcaactgttgggaagggcgatcggtgcgggcctcttcgctattacgccagctggcgaaagggggatgtgctgcaaggcgattaagttgggtaacgccagggttttcccagtcacgacgttgtaaaacgacggccagtgaattgacgcgtattgggatatttaaatggtacctcatcggcgagaagttccccatggccgccatctcccccccccggaagaacggcggctggggcgacatccgggaccacgagctgtgcaagtcctatcggcggctgcaggcgggagcgtatccttatgacgtccctgattacgcatatccttatgacgtccctgattacgcatatccttatgacgtccctgattacgcataaggagactgagctttagcgagggaacccgcatggcatacgttgccataacaagtgaccatctactctccttaaagtcatgggggtgctgctgcttggccggtgctgatcactcttgttgaggttccttcaggtgcggggactctctttggcgccttccctgcttgccgtgctctctcgacttgttctaattcccacgtgtgctctcttccgctttcgttgtagtggtgtacgctgcggttgagcttgttgtgcttgcgctacatttctcttcgaaggcggaggcaggcgcgcctgcgcagtgccgtgacgagagccactgccgtgtcgagctgcgagcaagagcagttaaggcaaaagggtaggtgagaaagatgactctgtgcggtgctctcttgtccatgcctgtccgttgttgtctcccctgtctctcccttttttcggcttgagtgacgttttgctgcctttgtacgttgttgtagtgtccttactgctctcgattgccgtcacgttgatgcccctatgtgtctccttttcttgcctcgcacattgcggatgtgctcccttctccgcccccttttttttttttttgccacagccggtgctgccttgttgcgagagcatgcgcatttggaacaaatggcacatagtcgtagcatctgcgctctggcctcggcgcctctctacacctttgctcaccgtgcatcacgccatctacaccatgttctcttcgtgttctgccactcttttaaatgctttgccttcccttggaatcccatgctcagccctcccctgcttctcacggtgcctgtggctctcggctgcgctctcctgtcgcctgttcttcttcttccgtccctgtggatgctgccgatttcccgtctgcccccgtctttcgtttgccgcctcccccttctgtgacgaatgccgtctctgtatcccggacgctccctcacgccaacccactcctcttttgcgttcttgcgtgtgcgtcgggcttctctccctccccctccccctccccctcccctgcctaccccatcaccgatgggtgtgtgggagagaggtggcaggggaagagggagtgcagataatgtgagacagaattgaaatatctgctctccgacacacagggagtaaatgcattcaacagggatggtaaggacacgcactggcgtgacatggagaaaaaataatggagtaatgcatgcagggctgaactcggcacagaggtacgcacccgtgggcaccctcttctctacggccctacctctttgtctccaatcgttttgtccccgtatgtcattattattgctcacctcgcggcattcttgatgtagccgcctcttgacatgtatagtgttgttcattagtatccaccgcaagaaaagaaatcctgcataccaccaatcgcgcgcactggacgttgccgaaagcagtcagtgggcaccttggacgttgccgccggtgtggaagtggccgcgtcgcaagcaggcctccatgacgttgactgcacgtccctcccggaaaggggatggctttggtgccatttaggacacaaatggagcttcttgtcgacccttgcttcgaggaatgaggctgcgtgtatgtgtcttggtgacccctttgggctgtgcagcttgtggcgtgtgcgcaccggcgtgtgccaacgcccaggtactgtgcgcacgttcgtatctccatacgctagctgaccgagacgcatgccctccgccaccctcagtggcgcgcaccttctctcgtttgagctctttatgctctcgtgaatggcacacaacatcccgtgactatcacgatgatccttctcaagccacaccgcttgccttttctacagctctgcgttctctggcccatcctcctcttgtttgctttccctctttgcacatccgtgtgcgcgtccttgttcttctcttctgcgcacactattctgcgcccgcgacccgcgcttcgactgctgtcgggtcatgccttgtgctgcgcgttcagctcttcattgcccctcggccttgtacatagcggctctccgtcatcgacgttttcctctctcttcagctctatacactccctcccttgtcaacacactacactgtgtctccccctttcatctctcctcccctgtcacaggtaccatttaaatatcccaatggcgcgccgagcttggctcgagcatggtcatagctgtttcctgtgtgaaattgttatccgctcacaattccacacaacatacgagccggaagcataaagtgtaaagcctggggtgcctaatgagtgagctaactcacattaattgcgttgcgctcactgcccgctttccagtcgggaaacctgtcgtgccagctgcattaatgaatcggccaacgcgcggggagaggcggtttgcgtattgggcgctcttccgcttcctcgctcactgactcgctgcgctcggtcgttcggctgcggcgagcggtatcagctcactcaaaggcggtaatacggttatccacagaatcaggggataacgcaggaaagaacatgtgagcaaaaggccagcaaaaggccaggaaccgtaaaaaggccgcgttgctggcgtttttccataggctccgcccccctgacgagcatcacaaaaatcgacgctcaagtcagaggtggcgaaacccgacaggactataaagataccaggcgtttccccctggaagctccctcgtgcgctctcctgttccgaccctgccgcttaccggatacctgtccgcctttctcccttcgggaagcgtggcgctttctcatagctcacgctgtaggtatctcagttcggtgtaggtcgttcgctccaagctgggctgtgtgcacgaaccccccgttcagcccgaccgctgcgccttatccggtaactatcgtcttgagtccaacccggtaagacacgacttatcgccactggcagcagccactggtaacaggattagcagagcgaggtatgtaggcggtgctacagagttcttgaagtggtggcctaactacggctacactagaagaacagtatttggtatctgcgctctgctgaagccagttaccttcggaaaaagagttggtagctcttgatccggcaaacaaaccaccgctggtagcggtggtttttttgtttgcaagcagcagattacgcgcagaaaaaaaggatctcaagaagatcctttgatcttttctacggggtctgacgctcagtggaacgaaaactcacgttaagggattttggtcatgagattatcaaaaaggatcttcacctagatccttttaaattaaaaatgaagttttaaatcaatctaaagtatatatgagtaaacttggtctgacagttagaaaaactcatcgagcatcaaatgaaactgcaatttattcatatcaggattatcaataccatatttttgaaaaagccgtttctgtaatgaaggagaaaactcaccgaggcagttccataggatggcaagatcctggtatcggtctgcgattccgactcgtccaacatcaatacaacctattaatttcccctcgtcaaaaataaggttatcaagtgagaaatcaccatgagtgacgactgaatccggtgagaatggcaaaagtttatgcatttctttccagacttgttcaacaggccagccattacgctcgtcatcaaaatcactcgcatcaaccaaaccgttattcattcgtgattgcgcctgagcgagacgaaatacgcgatcgctgttaaaaggacaattacaaacaggaatcgaatgcaaccggcgcaggaacactgccagcgcatcaacaatattttcacctgaatcaggatattcttctaatacctggaatgctgttttcccagggatcgcagtggtgagtaaccatgcatcatcaggagtacggataaaatgcttgatggtcggaagaggcataaattccgtcagccagtttagtctgaccatctcatctgtaacatcattggcaacgctacctttgccatgtttcagaaacaactctggcgcatcgggcttcccatacaatcgatagattgtcgcacctgattgcccgacattatcgcgagcccatttatacccatataaatcagcatccatgttggaatttaatcgcggcctagagcaagacgtttcccgttgaatatggctcatactcttcctttttcaatattattgaagcatttatcagggttattgtctcatgagcggatacatatttgaatgtatttagaaaaataaacaaataggggttccgcgcacatttccccgaaaagtgccacctgacgtctaagaaaccattattatcatgacattaacctataaaaataggcgtatcacgaggccctttcgtc

SEQ ID NO: 14 - DNA, 4995 bp, Artificial Sequence
  pLMTB6849
tcgcgcgtttcggtgatgacggtgaaaacctctgacacatgcagctcccggagacggtcacagcttgtctgtaagcggatgccgggagcagacaagcccgtcagggcgcgtcagcgggtgttggcgggtgtcggggctggcttaactatgcggcatcagagcagattgtactgagagtgcaccatatgcggtgtgaaataccgcacagatgcgtaaggagaaaataccgcatcaggcgccattcgccattcaggctgcgcaactgttgggaagggcgatcggtgcgggcctcttcgctattacgccagctggcgaaagggggatgtgctgcaaggcgattaagttgggtaacgccagggttttcccagtcacgacgttgtaaaacgacggccagtgaattgacgcgtattgggatatttaaatggtacctccgccacagccgcgacaagaagaacgagccgaacccgcagcgcttcgaccgcatcgcgcacacgaaggagacgatgctgagcgacggcctgaacagcctgacgtaccaggtgctggacgtgcagcgctacccgctgtacacgcagatcacggtggacatcggcacgccgagctggtcccacccgcagttcgagaagtaaggagactgagctttagcgagggaacccgcatggcatacgttgccataacaagtgaccatctactctccttaaagtcatgggggtgctgctgcttggccggtgctgatcactcttgttgaggttccttcaggtgcggggactctctttggcgccttccctgcttgccgtgctctctcgacttgttctaattcccacgtgtgctctcttccgctttcgttgtagtggtgtacgctgcggttgagcttgttgtgcttgcgctacatttctcttcgaaggcggaggcaggcgcgcctgcgcagtgccgtgacgagagccactgccgtgtcgagctgcgagcaagagcagttaaggcaaaagggtaggtgagaaagatgactctgtgcggtgctctcttgtccatgcctgtccgttgttgtctcccctgtctctcccttttttcggcttgagtgacgttttgctgcctttgtacgttgttgtagtgtccttactgctctcgattgccgtcacgttgatgcccctatgtgtctccttttcttgcctcgcacattgcggatgtgctcccttctccgcccccttttttttttttttgccacagccggtgctgccttgttgcgagagcatgcgcatttggaacaaatggcacatagtcgtagcatctgcgctctggcctcggcgcctctctacacctttgctcaccgtgcatcacgccatctacaccatgttctcttcgtgttctgccactcttttaaatgctttgccttcccttggaatcccatgctcagccctcccctgcttctcacggtgcctgtggctctcggctgcgctctcctgtcgcctgttcttcttcttccgtccctgtggatgctgccgatttcccgtctgcccccgtctttcgtttgccgcctcccccttctgtgacgaatgccgtctctgtatcccggacgctccctcacgccaacccactcctcttttgcgttcttgcgtgtgcgtcgggcttctctccctccccctccccctccccctcccctgcctaccccatcaccgatgggtgtgtgggagagaggtggcaggggaagagggagtgcagataatgtgagacagaattgaaatatctgctctccgacacacagggagtaaatgcattcaacagggatggtaaggacacgcactggcgtgacatggagaaaaaataatggagtaatgcatgcagggctgaactcggcacagaggtacgcacccgtgggcaccctcttctctacggccctacctctttgtctccaatcgttttgtccccgtatgtcattattattgctcacctcgcggcattcttgatgtagccgcctcttgacatgtatagtgttgttcattagtatccaccgcaagaaaagaaatcctgcataccaccaatcgcgcgcactggacgttgccgaaagcagtcagtgggcaccttggacgttgccgccggtgtggaagtggccgcgtcgcaagcaggcctccatgacgttgactgcacgtccctcccggaaaggggatggctttggtgccatttaggacacaaatggagcttcttgtcgacccttgcttcgaggaatgaggctgcgtgtatgtgtcttggtgacccctttgggctgtgcagcttgtggcgtgtgcgcaccggcgtgtgccaacgcccaggtactgtgcgcacgttcgtatctccatacgctagctgaccgagacgcatgccctccgccaccctcagtggcgcgcaccttctctcgtttgagctctttatgctctcgtgaatggcacacaacatcccgtgactatcacgatgatccttctcaagccacaccgcttgccttttctacagctctgcgttctctggcccatcctcctcttgtttgctttccctctttgcacatccgtgtgcgcgtccttgttcttctcttctgcgcacactattctgcgcccgcgacccgcgcttcgactgctgtcgggtcatgccttgtgctgcgcgttcagctcttcattgcccctcggccttgtacatagcggctctccgtcatcgacgttttcctctctcttcagctctatacactccctcccttgtcaacacactacactgtgtctccccctttcatctctcctcccctgtcacaggtaccatttaaatatcccaatggcgcgccgagcttggctcgagcatggtcatagctgtttcctgtgtgaaattgttatccgctcacaattccacacaacatacgagccggaagcataaagtgtaaagcctggggtgcctaatgagtgagctaactcacattaattgcgttgcgctcactgcccgctttccagtcgggaaacctgtcgtgccagctgcattaatgaatcggccaacgcgcggggagaggcggtttgcgtattgggcgctcttccgcttcctcgctcactgactcgctgcgctcggtcgttcggctgcggcgagcggtatcagctcactcaaaggcggtaatacggttatccacagaatcaggggataacgcaggaaagaacatgtgagcaaaaggccagcaaaaggccaggaaccgtaaaaaggccgcgttgctggcgtttttccataggctccgcccccctgacgagcatcacaaaaatcgacgctcaagtcagaggtggcgaaacccgacaggactataaagataccaggcgtttccccctggaagctccctcgtgcgctctcctgttccgaccctgccgcttaccggatacctgtccgcctttctcccttcgggaagcgtggcgctttctcatagctcacgctgtaggtatctcagttcggtgtaggtcgttcgctccaagctgggctgtgtgcacgaaccccccgttcagcccgaccgctgcgccttatccggtaactatcgtcttgagtccaacccggtaagacacgacttatcgccactggcagcagccactggtaacaggattagcagagcgaggtatgtaggcggtgctacagagttcttgaagtggtggcctaactacggctacactagaagaacagtatttggtatctgcgctctgctgaagccagttaccttcggaaaaagagttggtagctcttgatccggcaaacaaaccaccgctggtagcggtggtttttttgtttgcaagcagcagattacgcgcagaaaaaaaggatctcaagaagatcctttgatcttttctacggggtctgacgctcagtggaacgaaaactcacgttaagggattttggtcatgagattatcaaaaaggatcttcacctagatccttttaaattaaaaatgaagttttaaatcaatctaaagtatatatgagtaaacttggtctgacagttagaaaaactcatcgagcatcaaatgaaactgcaatttattcatatcaggattatcaataccatatttttgaaaaagccgtttctgtaatgaaggagaaaactcaccgaggcagttccataggatggcaagatcctggtatcggtctgcgattccgactcgtccaacatcaatacaacctattaatttcccctcgtcaaaaataaggttatcaagtgagaaatcaccatgagtgacgactgaatccggtgagaatggcaaaagtttatgcatttctttccagacttgttcaacaggccagccattacgctcgtcatcaaaatcactcgcatcaaccaaaccgttattcattcgtgattgcgcctgagcgagacgaaatacgcgatcgctgttaaaaggacaattacaaacaggaatcgaatgcaaccggcgcaggaacactgccagcgcatcaacaatattttcacctgaatcaggatattcttctaatacctggaatgctgttttcccagggatcgcagtggtgagtaaccatgcatcatcaggagtacggataaaatgcttgatggtcggaagaggcataaattccgtcagccagtttagtctgaccatctcatctgtaacatcattggcaacgctacctttgccatgtttcagaaacaactctggcgcatcgggcttcccatacaatcgatagattgtcgcacctgattgcccgacattatcgcgagcccatttatacccatataaatcagcatccatgttggaatttaatcgcggcctagagcaagacgtttcccgttgaatatggctcatactcttcctttttcaatattattgaagcatttatcagggttattgtctcatgagcggatacatatttgaatgtatttagaaaaataaacaaataggggttccgcgcacatttccccgaaaagtgccacctgacgtctaagaaaccattattatcatgacattaacctataaaaataggcgtatcacgaggccctttcgtc

SEQ ID NO: 15 - DNA, 4219 bp, Artificial Sequence
  pLMTB6851
tcgcgcgtttcggtgatgacggtgaaaacctctgacacatgcagctcccggagacggtcacagcttgtctgtaagcggatgccgggagcagacaagcccgtcagggcgcgtcagcgggtgttggcgggtgtcggggctggcttaactatgcggcatcagagcagattgtactgagagtgcaccatatgcggtgtgaaataccgcacagatgcgtaaggagaaaataccgcatcaggcgccattcgccattcaggctgcgcaactgttgggaagggcgatcggtgcgggcctcttcgctattacgccagctggcgaaagggggatgtgctgcaaggcgattaagttgggtaacgccagggttttcccagtcacgacgttgtaaaacgacggccagtgaattgacgcgtattgggatatttaaatggtacctattctgcgcccgcgacccgcgcttcgactgctgtcgggtcatgccttgtgctgcgcgttcagctcttcattgcccctcggccttgtacatagcggctctccgtcatcgacgttttcctctctcttcagctctatacactccctcccttgtcaacacactacactgtgtctccccctttcatctctcctcccctgtcacaatgcggctcaacgtcaagaaggcgctcatcttcgtcggctgcgtggtcttcctctgggtcctgctctcgtacgcgagcgtgattgaggtgccgcgcgcggtcccgcagaaggacccggccgtggagatcgagaagaaaatcattaagctgcaaaagcaggtggacgcccagatggccgagagcaaatcgctgctggcgaaggtcaagaagctgaagaagattagcgagggcgagaacgtgggtggcgaagaggacagcctgaaggactcggaggtgatgcagcacctgtcgcagccgatcctgccggtcctcgtcatcgcgtgtgaccgggtgaccgtccagcgctgcctggacaacctcgtcaagttccgccccagcaaggagacgttcccgatcattgtgagccaagactgtggccacaacgccacctacgaagtgatcacgagctacacggcgagcgacccgacgatcagcgtggtgcgccaaccggacctcagcgagatcgtgctgccccgcgtgaaggtgaagttccggggctactacaagatcgcccgccactataagttcgcgctgaaccacgtctttgagacgctgggccatgaagcggtgatcattgtggaggatgacctggacatctcgccggacttcttcgagtactttctcggcacgtacccgctgctgctgaaggatccgagcctgtggtgcatctcggcgtggaacgacaacggcaagatggaggtcattgatatgtcgcgccccgacctcctccatcgcacggacttcttcccgggcctcggttgggtcctccggcgcgaaatgtggcgcaagctggcgccgaagtggcccacggccttcttcgacgactggctgcgcaacccggtgaatatcgacggcaaggcctgcatccgcccggagatcagccgcacgtacagcttcggcaaggtcggcgtgagcaagggcctgttctttgacctccatctgcgcaacatccagctcaacatggagtacgtggagttcacgaagctgaacctgacgtacctcctgaaggagcactacgacgacgcgctggtgagcacggtgtacaacctgccggaaatgtcggcgagcgaggtggtggcgggcagcgacctgagcgccgacccggtgcgcgtcatgtactcgaacgcgaagacctaccagcgcgccgccaagaagctcggcctgatggacgatttccgctcgggcgtgccgcgcacggcgtatcgcggcattgtgacgtgctttatccggggccgccgcgtgtatctcgccccgagcttcgagtggaacaagtacgatcccacgtggggtgcgggcgcctggagccatccgcagttcgagaagtgaggtaccatttaaatatcccaatggcgcgccgagcttggctcgagcatggtcatagctgtttcctgtgtgaaattgttatccgctcacaattccacacaacatacgagccggaagcataaagtgtaaagcctggggtgcctaatgagtgagctaactcacattaattgcgttgcgctcactgcccgctttccagtcgggaaacctgtcgtgccagctgcattaatgaatcggccaacgcgcggggagaggcggtttgcgtattgggcgctcttccgcttcctcgctcactgactcgctgcgctcggtcgttcggctgcggcgagcggtatcagctcactcaaaggcggtaatacggttatccacagaatcaggggataacgcaggaaagaacatgtgagcaaaaggccagcaaaaggccaggaaccgtaaaaaggccgcgttgctggcgtttttccataggctccgcccccctgacgagcatcacaaaaatcgacgctcaagtcagaggtggcgaaacccgacaggactataaagataccaggcgtttccccctggaagctccctcgtgcgctctcctgttccgaccctgccgcttaccggatacctgtccgcctttctcccttcgggaagcgtggcgctttctcatagctcacgctgtaggtatctcagttcggtgtaggtcgttcgctccaagctgggctgtgtgcacgaaccccccgttcagcccgaccgctgcgccttatccggtaactatcgtcttgagtccaacccggtaagacacgacttatcgccactggcagcagccactggtaacaggattagcagagcgaggtatgtaggcggtgctacagagttcttgaagtggtggcctaactacggctacactagaagaacagtatttggtatctgcgctctgctgaagccagttaccttcggaaaaagagttggtagctcttgatccggcaaacaaaccaccgctggtagcggtggtttttttgtttgcaagcagcagattacgcgcagaaaaaaaggatctcaagaagatcctttgatcttttctacggggtctgacgctcagtggaacgaaaactcacgttaagggattttggtcatgagattatcaaaaaggatcttcacctagatccttttaaattaaaaatgaagttttaaatcaatctaaagtatatatgagtaaacttggtctgacagttagaaaaactcatcgagcatcaaatgaaactgcaatttattcatatcaggattatcaataccatatttttgaaaaagccgtttctgtaatgaaggagaaaactcaccgaggcagttccataggatggcaagatcctggtatcggtctgcgattccgactcgtccaacatcaatacaacctattaatttcccctcgtcaaaaataaggttatcaagtgagaaatcaccatgagtgacgactgaatccggtgagaatggcaaaagtttatgcatttctttccagacttgttcaacaggccagccattacgctcgtcatcaaaatcactcgcatcaaccaaaccgttattcattcgtgattgcgcctgagcgagacgaaatacgcgatcgctgttaaaaggacaattacaaacaggaatcgaatgcaaccggcgcaggaacactgccagcgcatcaacaatattttcacctgaatcaggatattcttctaatacctggaatgctgttttcccagggatcgcagtggtgagtaaccatgcatcatcaggagtacggataaaatgcttgatggtcggaagaggcataaattccgtcagccagtttagtctgaccatctcatctgtaacatcattggcaacgctacctttgccatgtttcagaaacaactctggcgcatcgggcttcccatacaatcgatagattgtcgcacctgattgcccgacattatcgcgagcccatttatacccatataaatcagcatccatgttggaatttaatcgcggcctagagcaagacgtttcccgttgaatatggctcatactcttcctttttcaatattattgaagcatttatcagggttattgtctcatgagcggatacatatttgaatgtatttagaaaaataaacaaataggggttccgcgcacatttccccgaaaagtgccacctgacgtctaagaaaccattattatcatgacattaacctataaaaataggcgtatcacgaggccctttcgtc

SEQ ID NO: 16 - DNA, 4429 bp, Artificial Sequence
  pLMTB6852
tcgcgcgtttcggtgatgacggtgaaaacctctgacacatgcagctcccggagacggtcacagcttgtctgtaagcggatgccgggagcagacaagcccgtcagggcgcgtcagcgggtgttggcgggtgtcggggctggcttaactatgcggcatcagagcagattgtactgagagtgcaccatatgcggtgtgaaataccgcacagatgcgtaaggagaaaataccgcatcaggcgccattcgccattcaggctgcgcaactgttgggaagggcgatcggtgcgggcctcttcgctattacgccagctggcgaaagggggatgtgctgcaaggcgattaagttgggtaacgccagggttttcccagtcacgacgttgtaaaacgacggccagtgaattgacgcgtattgggatatttaaatggtacctattctgcgcccgcgacccgcgcttcgactgctgtcgggtcatgccttgtgctgcgcgttcagctcttcattgcccctcggccttgtacatagcggctctccgtcatcgacgttttcctctctcttcagctctatacactccctcccttgtcaacacactacactgtgtctccccctttcatctctcctcccctgtcacaatggtccggaagaagggctccctgatcctgtgcggcgccttcctgttcgtcgcctggaacgccctgctgctgctgttcctgtggggccggccccccatcggccggctgggcgagggcggcggcgccgagcccggcgccggcgaggagtggggcgccggcaagtccaaggtcggcggcgccaacggcctggccggcgaggtcatccggctggccgaggaggtcgagtccgagctggagacccagaagaagctgctgaagcagatccagtcccaccgggagctgtgggagcagcggaaggagctggagaagcgggagtccgaggacaccaaggacgagaagatcgacgtcgagcccaagaagccccggcagatccccgccgtccacctgtcccacaaggtcgtcgaggacgcccagaccgtcaccaagaagatgcagaccctgatggtcacccccccccagctggtcatgaaggagcaggagaccgaccagaagaacaagcagatgatggaggaccagctgggcctgaccaccccctccccccagatcatcatccccatcctggtcatcgcctgcgaccgggtcaccgtcaagcggtccctggaccggctgatccagtatcggccctccgccgagctgtatcccatcatcgtctcccaggactgcggccacgccgacaccgcccgggtcatcggctcctatggctcccagatcacccacatctcccagcccgacctggccgacatccccgtccggcccgaccaccggaagttccagggctattataagatcgcccggcactatcggtgggccctgaaccaggtcttcaacgtcttcgcctattccaccgtcgtcatcgtcgaggacgacctggaggtcgcccccgacttcttcgagtatttccgggccctgtatcccatcctgcggtccgaccccaccctgtggtgcatctccgcctggaacgacaacggccgggacggcctggtcgaccccggcaaggccgagctgctgtatcggaccgacttcttccccggcctgggctggatgctgctgaaggaggtctgggccgagctggagcccaagtggcccaaggccttctgggacgactggatgcggcaccccgagcagcggaagaaccggtcctgcatccggcccgaaatttctcggaccatcaccttcggccggaagggcgtctccctgggccagttcttcgaccagtatctgcggtatatcaagctgaacaccgagttcgtccccttcaccaagcacgacctgtcctatctggtccgggagaagtatgacgtctccttcgagaaggacgtctattccgcccccctggtcaaggtcgaggagctgcagcacggcggctccctgaagggctccggccccttccgggtccagtattcctcccgggactccttcaaggtcctggcccggaacctgggcgtcatggacgacctgaagtccggcgtcccccgggccggctatcggggcgtcgtctccttcatctcccggggccggcggatctatctggccccccccgagggctggaccaagtatgacgtctcctggtcctaaggtaccatttaaatatcccaatggcgcgccgagcttggctcgagcatggtcatagctgtttcctgtgtgaaattgttatccgctcacaattccacacaacatacgagccggaagcataaagtgtaaagcctggggtgcctaatgagtgagctaactcacattaattgcgttgcgctcactgcccgctttccagtcgggaaacctgtcgtgccagctgcattaatgaatcggccaacgcgcggggagaggcggtttgcgtattgggcgctcttccgcttcctcgctcactgactcgctgcgctcggtcgttcggctgcggcgagcggtatcagctcactcaaaggcggtaatacggttatccacagaatcaggggataacgcaggaaagaacatgtgagcaaaaggccagcaaaaggccaggaaccgtaaaaaggccgcgttgctggcgtttttccataggctccgcccccctgacgagcatcacaaaaatcgacgctcaagtcagaggtggcgaaacccgacaggactataaagataccaggcgtttccccctggaagctccctcgtgcgctctcctgttccgaccctgccgcttaccggatacctgtccgcctttctcccttcgggaagcgtggcgctttctcatagctcacgctgtaggtatctcagttcggtgtaggtcgttcgctccaagctgggctgtgtgcacgaaccccccgttcagcccgaccgctgcgccttatccggtaactatcgtcttgagtccaacccggtaagacacgacttatcgccactggcagcagccactggtaacaggattagcagagcgaggtatgtaggcggtgctacagagttcttgaagtggtggcctaactacggctacactagaagaacagtatttggtatctgcgctctgctgaagccagttaccttcggaaaaagagttggtagctcttgatccggcaaacaaaccaccgctggtagcggtggtttttttgtttgcaagcagcagattacgcgcagaaaaaaaggatctcaagaagatcctttgatcttttctacggggtctgacgctcagtggaacgaaaactcacgttaagggattttggtcatgagattatcaaaaaggatcttcacctagatccttttaaattaaaaatgaagttttaaatcaatctaaagtatatatgagtaaacttggtctgacagttagaaaaactcatcgagcatcaaatgaaactgcaatttattcatatcaggattatcaataccatatttttgaaaaagccgtttctgtaatgaaggagaaaactcaccgaggcagttccataggatggcaagatcctggtatcggtctgcgattccgactcgtccaacatcaatacaacctattaatttcccctcgtcaaaaataaggttatcaagtgagaaatcaccatgagtgacgactgaatccggtgagaatggcaaaagtttatgcatttctttccagacttgttcaacaggccagccattacgctcgtcatcaaaatcactcgcatcaaccaaaccgttattcattcgtgattgcgcctgagcgagacgaaatacgcgatcgctgttaaaaggacaattacaaacaggaatcgaatgcaaccggcgcaggaacactgccagcgcatcaacaatattttcacctgaatcaggatattcttctaatacctggaatgctgttttcccagggatcgcagtggtgagtaaccatgcatcatcaggagtacggataaaatgcttgatggtcggaagaggcataaattccgtcagccagtttagtctgaccatctcatctgtaacatcattggcaacgctacctttgccatgtttcagaaacaactctggcgcatcgggcttcccatacaatcgatagattgtcgcacctgattgcccgacattatcgcgagcccatttatacccatataaatcagcatccatgttggaatttaatcgcggcctagagcaagacgtttcccgttgaatatggctcatactcttcctttttcaatattattgaagcatttatcagggttattgtctcatgagcggatacatatttgaatgtatttagaaaaataaacaaataggggttccgcgcacatttccccgaaaagtgccacctgacgtctaagaaaccattattatcatgacattaacctataaaaataggcgtatcacgaggccctttcgtc

SEQ ID NO: 17 - DNA, 4451 bp, Artificial Sequence
  pLMTB6855
tcgcgcgtttcggtgatgacggtgaaaacctctgacacatgcagctcccggagacggtcacagcttgtctgtaagcggatgccgggagcagacaagcccgtcagggcgcgtcagcgggtgttggcgggtgtcggggctggcttaactatgcggcatcagagcagattgtactgagagtgcaccatatgcggtgtgaaataccgcacagatgcgtaaggagaaaataccgcatcaggcgccattcgccattcaggctgcgcaactgttgggaagggcgatcggtgcgggcctcttcgctattacgccagctggcgaaagggggatgtgctgcaaggcgattaagttgggtaacgccagggttttcccagtcacgacgttgtaaaacgacggccagtgaattgacgcgtattgggatatttaaatggtaccagcaagcaggcgctgtggggtttatccacacagaagagaaaatagggtccgtgaagcctgcctacaaagggcgtggaatgataaacacgacgtacaagaacatgccgagcagggcaccaacaaatgggacgataaggggtaaccaaaagtagtggtcgtgcaacgtgaagggctctgagccccagagcatcgcggagaggacgcgaggtgcaaagtcacgtgcgggattgaggcaataccctgagttaatgcctgtagtggcaccaataaccaccagcagcagcccaatagccaccggcttgtagtttgtagccggcgtcatgcggtcatctgtaatggcgagaatgcccatcagtagtgccatggtgttgaacacctcgctccacaccgcatagccggtcgccaccttcgggtaggtgacgaagatcccgccatacttggacgccatcgtctctgttggaagtaagttcctctcgccctcgtcaaagtgggacttgaacgcgtggggatggatcgcgagggacgcggggtttgagggccgtgggtggtgtggagagtgtggttgattattgtatggtggtgagggtggaaggtgtggcggggatggtggtgcggtggtgtcggaaggggtgtgtgagagggcgcgggtccttgagggagggtgggtgtgttgttgttttgcgggtgttatccggggcttgggtgttggtgtgattggtgactatgtaggggtgaagggtgagtggagggggtcgccagaggcgttccgttctacgaagcttcattcctatgtccgactccgaagcatgcctgcagttctgctggctatgtgggcgtgtctgggcaacgactgaattgagaaggggagtcgaaacggtgcgtggatgctgtgtttgtgctacacacaagcaaaggcaacaacacaagcgcatcgagccagacgaaccaacccaatattcacacaactgtacgtggccgcgcgctgtatctccgatgggatgatgcgtgtgcgtgtgccaccaccacgtactagtttccagccttactgcttgtataccttgtcttttgcgttgtgcttgcgcgtgctgtgtacctctgctcgtgcgttccgtatcccgggacctgcgggcggtgggtgccacacaacccgtcacattcaacatcactcatacatctcaccgatgtgtgcgtgtgcttgctgtgtgcgtgtgttgtgtggcgtcaaacctgtttgaaaacacacccctagcactattcgaccgcgaaagcgcccccccaaaggggccggtgtgcaatgcgagctacatgtatgtgtagagagcgctgcgccgaactagtcgtgcgtgctgaacatgttttgtgtgtgctgccgtgtctacacgtttgcagcggaaactcggttgaaccagaaacagaacttgattgttgctgcatttcgaggaatttcagccaaacaagaggtcaacaaccaagccgcgtgtacacatatacacacaccgcgtgtatgtatatatgcgtttgttttgttaccacaaatactgagttgtctgatgtgagcttctgctacagacgcaattcaggaaatacaacaaaatacaacacttgatcatcaatgcgcaatgtgcgcgtgttgtgtgtgtgtgtgcgagcgcacacacacatgcacacgactcacgttgtcacacaattgagagctctctcttctccttcccctctctctcctctctcctctctccagagctctctcttctccttcccctctctctcctctctcctctctccagagctcgagccaccggtaccatttaaatatcccaatggcgcgccgagcttggctcgagcatggtcatagctgtttcctgtgtgaaattgttatccgctcacaattccacacaacatacgagccggaagcataaagtgtaaagcctggggtgcctaatgagtgagctaactcacattaattgcgttgcgctcactgcccgctttccagtcgggaaacctgtcgtgccagctgcattaatgaatcggccaacgcgcggggagaggcggtttgcgtattgggcgctcttccgcttcctcgctcactgactcgctgcgctcggtcgttcggctgcggcgagcggtatcagctcactcaaaggcggtaatacggttatccacagaatcaggggataacgcaggaaagaacatgtgagcaaaaggccagcaaaaggccaggaaccgtaaaaaggccgcgttgctggcgtttttccataggctccgcccccctgacgagcatcacaaaaatcgacgctcaagtcagaggtggcgaaacccgacaggactataaagataccaggcgtttccccctggaagctccctcgtgcgctctcctgttccgaccctgccgcttaccggatacctgtccgcctttctcccttcgggaagcgtggcgctttctcatagctcacgctgtaggtatctcagttcggtgtaggtcgttcgctccaagctgggctgtgtgcacgaaccccccgttcagcccgaccgctgcgccttatccggtaactatcgtcttgagtccaacccggtaagacacgacttatcgccactggcagcagccactggtaacaggattagcagagcgaggtatgtaggcggtgctacagagttcttgaagtggtggcctaactacggctacactagaagaacagtatttggtatctgcgctctgctgaagccagttaccttcggaaaaagagttggtagctcttgatccggcaaacaaaccaccgctggtagcggtggtttttttgtttgcaagcagcagattacgcgcagaaaaaaaggatctcaagaagatcctttgatcttttctacggggtctgacgctcagtggaacgaaaactcacgttaagggattttggtcatgagattatcaaaaaggatcttcacctagatccttttaaattaaaaatgaagttttaaatcaatctaaagtatatatgagtaaacttggtctgacagttagaaaaactcatcgagcatcaaatgaaactgcaatttattcatatcaggattatcaataccatatttttgaaaaagccgtttctgtaatgaaggagaaaactcaccgaggcagttccataggatggcaagatcctggtatcggtctgcgattccgactcgtccaacatcaatacaacctattaatttcccctcgtcaaaaataaggttatcaagtgagaaatcaccatgagtgacgactgaatccggtgagaatggcaaaagtttatgcatttctttccagacttgttcaacaggccagccattacgctcgtcatcaaaatcactcgcatcaaccaaaccgttattcattcgtgattgcgcctgagcgagacgaaatacgcgatcgctgttaaaaggacaattacaaacaggaatcgaatgcaaccggcgcaggaacactgccagcgcatcaacaatattttcacctgaatcaggatattcttctaatacctggaatgctgttttcccagggatcgcagtggtgagtaaccatgcatcatcaggagtacggataaaatgcttgatggtcggaagaggcataaattccgtcagccagtttagtctgaccatctcatctgtaacatcattggcaacgctacctttgccatgtttcagaaacaactctggcgcatcgggcttcccatacaatcgatagattgtcgcacctgattgcccgacattatcgcgagcccatttatacccatataaatcagcatccatgttggaatttaatcgcggcctagagcaagacgtttcccgttgaatatggctcatactcttcctttttcaatattattgaagcatttatcagggttattgtctcatgagcggatacatatttgaatgtatttagaaaaataaacaaataggggttccgcgcacatttccccgaaaagtgccacctgacgtctaagaaaccattattatcatgacattaacctataaaaataggcgtatcacgaggccctttcgtc

SEQ ID NO: 18 - DNA, 4075 bp, Artificial Sequence
  pLMTB6860
tcgcgcgtttcggtgatgacggtgaaaacctctgacacatgcagctcccggagacggtcacagcttgtctgtaagcggatgccgggagcagacaagcccgtcagggcgcgtcagcgggtgttggcgggtgtcggggctggcttaactatgcggcatcagagcagattgtactgagagtgcaccatatgcggtgtgaaataccgcacagatgcgtaaggagaaaataccgcatcaggcgccattcgccattcaggctgcgcaactgttgggaagggcgatcggtgcgggcctcttcgctattacgccagctggcgaaagggggatgtgctgcaaggcgattaagttgggtaacgccagggttttcccagtcacgacgttgtaaaacgacggccagtgaattgacgcgtattgggatatttaaatggtaccgctgcccactcaccatcaccggcctccttcgttggcagagcaacatttgttcatgagcagctctccgtactgtgtgtgtgcccactagccggtgcagagtaggagccgcgcttttgttgttgtacgtatcttttgacgtgggtgtgcgtgcaagcaaggatctacgcgcaacaagtagcaggcaagcggatctgttcgccatgcgcctgcgcgagccgctgctgagcggcagcgcggcgatgccgggcgcgagcctgcagcgcgcgtgccgcctgctggtggcggtgtgcgcgctgcacctgggcgtgacgctggtgtactacctggcgggccgcgacctgagccgcctgccgcagctggtgggcgtgagcacgccgctgcagggcggcagcaacagcgcggcggcgatcggccagagcagcggcgagctgcgcacgggcggcgcgcgcccgccgccgccgctgggcgcgagcagccagccgcgcccgggcggcgacagcagcccggtggtggacagcggcccgggcccggcgagcaacctgacgagcgtgccggtgccgcacacgacggcgctgagcctgccggcgtgcccggaggagagcccgctgctggtgggcccgatgctgatcgagttcaacatgccggtggacctggagctggtggcgaagcagaacccgaacgtgaagatgggtggtcgttacgcgccgcgcgactgcgtgagcccgcacaaggtggcgatcatcatcccgttccgcaaccgccaggagcacctgaagtactggctgtactacctgcacccggtgctgcagcgccagcagctggactacggcatctacgtgatcaaccaggcgggcgacacgatcttcaaccgcgcgaagctgctgaacgtgggcttccaggaggcgctgaaggactacgactacacgtgcttcgtgttcagcgacgtggacctgatcccgatgaacgaccacaacgcgtaccgctgcttcagccagccgcgccacatcagcgtggcgatggacaagttcggcttcagcctgccgtacgtgcagtacttcggcggcgtgagcgcgctgagcaagcagcagttcctgacgatcaacggcttcccgaacaactactggggctggggcggcgaggacgacgacatcttcaaccgcctggtgttccgcggcatgagcatcagccgcccgaacgcggtggtgggccgctgccgcatgatccgccacagccgcgacaagaagaacgagccgaacccgcagcgcttcgaccgcatcgcgcacacgaaggagacgatgctgagcgacggcctgaacagcctgacgtaccaggtgctggacgtgcagcgctacccgctgtacacgcagatcacggtggacatcggcacgccgagctggtcccacccgcagttcgagaagtaaggtaccatttaaatatcccaatggcgcgccgagcttggctcgagcatggtcatagctgtttcctgtgtgaaattgttatccgctcacaattccacacaacatacgagccggaagcataaagtgtaaagcctggggtgcctaatgagtgagctaactcacattaattgcgttgcgctcactgcccgctttccagtcgggaaacctgtcgtgccagctgcattaatgaatcggccaacgcgcggggagaggcggtttgcgtattgggcgctcttccgcttcctcgctcactgactcgctgcgctcggtcgttcggctgcggcgagcggtatcagctcactcaaaggcggtaatacggttatccacagaatcaggggataacgcaggaaagaacatgtgagcaaaaggccagcaaaaggccaggaaccgtaaaaaggccgcgttgctggcgtttttccataggctccgcccccctgacgagcatcacaaaaatcgacgctcaagtcagaggtggcgaaacccgacaggactataaagataccaggcgtttccccctggaagctccctcgtgcgctctcctgttccgaccctgccgcttaccggatacctgtccgcctttctcccttcgggaagcgtggcgctttctcatagctcacgctgtaggtatctcagttcggtgtaggtcgttcgctccaagctgggctgtgtgcacgaaccccccgttcagcccgaccgctgcgccttatccggtaactatcgtcttgagtccaacccggtaagacacgacttatcgccactggcagcagccactggtaacaggattagcagagcgaggtatgtaggcggtgctacagagttcttgaagtggtggcctaactacggctacactagaagaacagtatttggtatctgcgctctgctgaagccagttaccttcggaaaaagagttggtagctcttgatccggcaaacaaaccaccgctggtagcggtggtttttttgtttgcaagcagcagattacgcgcagaaaaaaaggatctcaagaagatcctttgatcttttctacggggtctgacgctcagtggaacgaaaactcacgttaagggattttggtcatgagattatcaaaaaggatcttcacctagatccttttaaattaaaaatgaagttttaaatcaatctaaagtatatatgagtaaacttggtctgacagttagaaaaactcatcgagcatcaaatgaaactgcaatttattcatatcaggattatcaataccatatttttgaaaaagccgtttctgtaatgaaggagaaaactcaccgaggcagttccataggatggcaagatcctggtatcggtctgcgattccgactcgtccaacatcaatacaacctattaatttcccctcgtcaaaaataaggttatcaagtgagaaatcaccatgagtgacgactgaatccggtgagaatggcaaaagtttatgcatttctttccagacttgttcaacaggccagccattacgctcgtcatcaaaatcactcgcatcaaccaaaccgttattcattcgtgattgcgcctgagcgagacgaaatacgcgatcgctgttaaaaggacaattacaaacaggaatcgaatgcaaccggcgcaggaacactgccagcgcatcaacaatattttcacctgaatcaggatattcttctaatacctggaatgctgttttcccagggatcgcagtggtgagtaaccatgcatcatcaggagtacggataaaatgcttgatggtcggaagaggcataaattccgtcagccagtttagtctgaccatctcatctgtaacatcattggcaacgctacctttgccatgtttcagaaacaactctggcgcatcgggcttcccatacaatcgatagattgtcgcacctgattgcccgacattatcgcgagcccatttatacccatataaatcagcatccatgttggaatttaatcgcggcctagagcaagacgtttcccgttgaatatggctcatactcttcctttttcaatattattgaagcatttatcagggttattgtctcatgagcggatacatatttgaatgtatttagaaaaataaacaaataggggttccgcgcacatttccccgaaaagtgccacctgacgtctaagaaaccattattatcatgacattaacctataaaaataggcgtatcacgaggccctttcgtc

SEQ ID NO: 19 - DNA, 4391 bp, Artificial Sequence
  pLMTB6861
tcgcgcgtttcggtgatgacggtgaaaacctctgacacatgcagctcccggagacggtcacagcttgtctgtaagcggatgccgggagcagacaagcccgtcagggcgcgtcagcgggtgttggcgggtgtcggggctggcttaactatgcggcatcagagcagattgtactgagagtgcaccatatgcggtgtgaaataccgcacagatgcgtaaggagaaaataccgcatcaggcgccattcgccattcaggctgcgcaactgttgggaagggcgatcggtgcgggcctcttcgctattacgccagctggcgaaagggggatgtgctgcaaggcgattaagttgggtaacgccagggttttcccagtcacgacgttgtaaaacgacggccagtgaattgacgcgtattgggatatttaaatggtacccgcaaggaatcggtcaatacactacatggcgtgatttcatatgcgcgattgctgatccccatgtgtatcactggcaaactgtgatggacgacaccgtcagtgcgtccgtcgcgcaggctctcgatgagctgatgctttgggccgaggactgccccgaagtccggcacctcgtgcacgcggatttcggctccaacaatgtcctgacggacaatggccgcataacagcggtcattgactggagcgaggcgatgttcggggattcccaatacgaggtcgccaacatcttcttctggaggccgtggttggcttgtatggagcagcagacgcgctacttcgagcggaggcatccggagcttgcaggatcgccgcggctccgggcgtatatgctccgcattggtcttgaccaactctatcagagcttggttgacggcaatttcgatgatgcagcttgggcgcagggtcgatgcgacgcaatcgtccgatccggagccgggactgtcgggcgtacacaaatcgcccgcagaagcgcggccgtctggaccgatggctgtgtagaagtactcgccgatagtggaaaccgacgccccagcactcgtccgagggcaaaggaatagctagcctcggagatccactagttctagttctaggggccgaattcagatcctcgtgtgagcgttcgcggaatcggtcgctcgtgtttatgcccgtcttggtgttgtgctcgcaaggcggtgcagcaggataccgtcgccctcctctctccttgcttctctgttcttcaattcgcgatctcacagaggccggctgtgcacgcccttcctcaccctccttttcccacctctcggccaccggtcggctccgttccgtctgccgtcgagaagggacgggcatgtgcagctcctccctttctctcgcgcgcgcatcttctcttgcttgtggcactcacgctcatgcgtcaaggcggccccacgccgagcccctgcgctcccttccctcttgcgcatccgtagcgcggatgccgtcgatgcgcaaggccggcatgaaggagcgcgtgccctcaagagggcacactatcatgccctacgtgggccacgcagcgatgaggccggcttcggcggagatgcgtcacgcacgtgccagatgatgcgctacgccttccttgacttgcgcccccctctcttcctccgtctctcactctctctctctcacacacacacacacacacacacacacacaagcccgtaagtattggcggcaccaacaaaagctcccagaaactgagcgagaaaatagcctggtagcttcttccaagggaacccggcaaacacgcagtttgccagcgtcacagccgggttcaagtgaccaccggacacacccatggtcaggaaaaggctgatggtcagccccaaaccccagccaaagttgatagccaggtagctcgggttcgactggccggcgccagtggcaccagcgttgaacacagtggtcgccaccacgccggtgccgaaggcaatcaggaaaaacgttccaaagaactcgctgaagtactcgcgtaactgccatcggaactcgtagagaggccatttgctctgtgacatccagttccatttgctctccttctcctgcggatcttcctcattcatgtgaactccagtggccacctcgtccgggtcctctttttgctcatataactgagcctcgacatcgtattgcgagggagccgtacctttatgcgcgggtaccatttaaatatcccaatggcgcgccgagcttggctcgagcatggtcatagctgtttcctgtgtgaaattgttatccgctcacaattccacacaacatacgagccggaagcataaagtgtaaagcctggggtgcctaatgagtgagctaactcacattaattgcgttgcgctcactgcccgctttccagtcgggaaacctgtcgtgccagctgcattaatgaatcggccaacgcgcggggagaggcggtttgcgtattgggcgctcttccgcttcctcgctcactgactcgctgcgctcggtcgttcggctgcggcgagcggtatcagctcactcaaaggcggtaatacggttatccacagaatcaggggataacgcaggaaagaacatgtgagcaaaaggccagcaaaaggccaggaaccgtaaaaaggccgcgttgctggcgtttttccataggctccgcccccctgacgagcatcacaaaaatcgacgctcaagtcagaggtggcgaaacccgacaggactataaagataccaggcgtttccccctggaagctccctcgtgcgctctcctgttccgaccctgccgcttaccggatacctgtccgcctttctcccttcgggaagcgtggcgctttctcatagctcacgctgtaggtatctcagttcggtgtaggtcgttcgctccaagctgggctgtgtgcacgaaccccccgttcagcccgaccgctgcgccttatccggtaactatcgtcttgagtccaacccggtaagacacgacttatcgccactggcagcagccactggtaacaggattagcagagcgaggtatgtaggcggtgctacagagttcttgaagtggtggcctaactacggctacactagaagaacagtatttggtatctgcgctctgctgaagccagttaccttcggaaaaagagttggtagctcttgatccggcaaacaaaccaccgctggtagcggtggtttttttgtttgcaagcagcagattacgcgcagaaaaaaaggatctcaagaagatcctttgatcttttctacggggtctgacgctcagtggaacgaaaactcacgttaagggattttggtcatgagattatcaaaaaggatcttcacctagatccttttaaattaaaaatgaagttttaaatcaatctaaagtatatatgagtaaacttggtctgacagttagaaaaactcatcgagcatcaaatgaaactgcaatttattcatatcaggattatcaataccatatttttgaaaaagccgtttctgtaatgaaggagaaaactcaccgaggcagttccataggatggcaagatcctggtatcggtctgcgattccgactcgtccaacatcaatacaacctattaatttcccctcgtcaaaaataaggttatcaagtgagaaatcaccatgagtgacgactgaatccggtgagaatggcaaaagtttatgcatttctttccagacttgttcaacaggccagccattacgctcgtcatcaaaatcactcgcatcaaccaaaccgttattcattcgtgattgcgcctgagcgagacgaaatacgcgatcgctgttaaaaggacaattacaaacaggaatcgaatgcaaccggcgcaggaacactgccagcgcatcaacaatattttcacctgaatcaggatattcttctaatacctggaatgctgttttcccagggatcgcagtggtgagtaaccatgcatcatcaggagtacggataaaatgcttgatggtcggaagaggcataaattccgtcagccagtttagtctgaccatctcatctgtaacatcattggcaacgctacctttgccatgtttcagaaacaactctggcgcatcgggcttcccatacaatcgatagattgtcgcacctgattgcccgacattatcgcgagcccatttatacccatataaatcagcatccatgttggaatttaatcgcggcctagagcaagacgtttcccgttgaatatggctcatactcttcctttttcaatattattgaagcatttatcagggttattgtctcatgagcggatacatatttgaatgtatttagaaaaataaacaaataggggttccgcgcacatttccccgaaaagtgccacctgacgtctaagaaaccattattatcatgacattaacctataaaaataggcgtatcacgaggccctttcgtc

SEQ ID NO: 20 - DNA, 4073 bp, Artificial Sequence
  pLMTB6873
tcgcgcgtttcggtgatgacggtgaaaacctctgacacatgcagctcccggagacggtcacagcttgtctgtaagcggatgccgggagcagacaagcccgtcagggcgcgtcagcgggtgttggcgggtgtcggggctggcttaactatgcggcatcagagcagattgtactgagagtgcaccatatgcggtgtgaaataccgcacagatgcgtaaggagaaaataccgcatcaggcgccattcgccattcaggctgcgcaactgttgggaagggcgatcggtgcgggcctcttcgctattacgccagctggcgaaagggggatgtgctgcaaggcgattaagttgggtaacgccagggttttcccagtcacgacgttgtaaaacgacggccagtgaattgacgcgtattgggatatttaaatggtacccgaagacctaccagcgcgccgccaagaagctcggcctgatggacgatttccgctcgggcgtgccgcgcacggcgtatcgcggcattgtgacgtgctttatccggggccgccgcgtgtatctcgccccgagcttcgagtggaacaagtacgatcccacgtggggtgcgggcgcctggagccatccgcagttcgagaagtgattagcgctccgtagctcgctgcgtatgagaggtactgagctccaatgcatcacacggcgtacggcaacacacactatcttttcagtttatttttttaattatccctccaaaaagaagcaactgacacttcaaaatattcccaacaaggagcgtgaggtcagtgaccagtctcggacttcacaccgcgcatgtagaagcacgcggcttgcgcgccaggcttcttttggcaaaccacgctgcacagaatgtctgtgtacagcagccaggctgtgatcgatctattatgctcgcccctcgctcctccggcattctcgagtccatgtcgagcttgtctggctccgtgcacatgcaagcgtttgtgcgcgcctctaatgtaaccacacgtcaaaacattgtgtgtcttccgaagtgggagacaccggggccaccaactccggtggtttacagcctcctccctcaaccaacgctgccgattgtaccacctttcattgcgtctttgtgcccctccctatcttcatgtttccactgcgcttcgtttccgaatactattttcgtgtactgtttcatcactttctcacaacagctcttttttttcacccgcagaagatgaaaaagcctgaactcaccgcgacgtctgtcgagaagtttctgatcgaaaagttcgacagcgtctccgacctgatgcagctctcggagggcgaagaatctcgtgctttcagcttcgatgtaggagggcgtggatatgtcctgcgggtaaatagctgcgccgatggtttctacaaagatcgttatgtttatcggcactttgcatcggccgcgctcccgattccggaagtgcttgacattggggaattcagcgagagcctgacctattgcatctcccgccgtgcacagggtgtcacgttgcaagacctgcctgaaaccgaactgcccgctgttctgcagccggtcgcggaggcgatggatgcgatcgctgcggccgatcttagccagacgagcgggttcggcccattcggaccgcaaggaatcggtcaatacactacatggcgtgatttcatatgcgcgattgctgatccccatgtgtatcactggcaaactgtgatggacgacaccgtcagtgcgtccgtcgcgcaggctctcgatgagctgatgctttgggccgaggactgccccgaagtccggcacctcgtgcacgcggatttcggctccaacaatgtccggtaccatttaaatatcccaatggcgcgccgagcttggctcgagcatggtcatagctgtttcctgtgtgaaattgttatccgctcacaattccacacaacatacgagccggaagcataaagtgtaaagcctggggtgcctaatgagtgagctaactcacattaattgcgttgcgctcactgcccgctttccagtcgggaaacctgtcgtgccagctgcattaatgaatcggccaacgcgcggggagaggcggtttgcgtattgggcgctcttccgcttcctcgctcactgactcgctgcgctcggtcgttcggctgcggcgagcggtatcagctcactcaaaggcggtaatacggttatccacagaatcaggggataacgcaggaaagaacatgtgagcaaaaggccagcaaaaggccaggaaccgtaaaaaggccgcgttgctggcgtttttccataggctccgcccccctgacgagcatcacaaaaatcgacgctcaagtcagaggtggcgaaacccgacaggactataaagataccaggcgtttccccctggaagctccctcgtgcgctctcctgttccgaccctgccgcttaccggatacctgtccgcctttctcccttcgggaagcgtggcgctttctcatagctcacgctgtaggtatctcagttcggtgtaggtcgttcgctccaagctgggctgtgtgcacgaaccccccgttcagcccgaccgctgcgccttatccggtaactatcgtcttgagtccaacccggtaagacacgacttatcgccactggcagcagccactggtaacaggattagcagagcgaggtatgtaggcggtgctacagagttcttgaagtggtggcctaactacggctacactagaagaacagtatttggtatctgcgctctgctgaagccagttaccttcggaaaaagagttggtagctcttgatccggcaaacaaaccaccgctggtagcggtggtttttttgtttgcaagcagcagattacgcgcagaaaaaaaggatctcaagaagatcctttgatcttttctacggggtctgacgctcagtggaacgaaaactcacgttaagggattttggtcatgagattatcaaaaaggatcttcacctagatccttttaaattaaaaatgaagttttaaatcaatctaaagtatatatgagtaaacttggtctgacagttagaaaaactcatcgagcatcaaatgaaactgcaatttattcatatcaggattatcaataccatatttttgaaaaagccgtttctgtaatgaaggagaaaactcaccgaggcagttccataggatggcaagatcctggtatcggtctgcgattccgactcgtccaacatcaatacaacctattaatttcccctcgtcaaaaataaggttatcaagtgagaaatcaccatgagtgacgactgaatccggtgagaatggcaaaagtttatgcatttctttccagacttgttcaacaggccagccattacgctcgtcatcaaaatcactcgcatcaaccaaaccgttattcattcgtgattgcgcctgagcgagacgaaatacgcgatcgctgttaaaaggacaattacaaacaggaatcgaatgcaaccggcgcaggaacactgccagcgcatcaacaatattttcacctgaatcaggatattcttctaatacctggaatgctgttttcccagggatcgcagtggtgagtaaccatgcatcatcaggagtacggataaaatgcttgatggtcggaagaggcataaattccgtcagccagtttagtctgaccatctcatctgtaacatcattggcaacgctacctttgccatgtttcagaaacaactctggcgcatcgggcttcccatacaatcgatagattgtcgcacctgattgcccgacattatcgcgagcccatttatacccatataaatcagcatccatgttggaatttaatcgcggcctagagcaagacgtttcccgttgaatatggctcatactcttcctttttcaatattattgaagcatttatcagggttattgtctcatgagcggatacatatttgaatgtatttagaaaaataaacaaataggggttccgcgcacatttccccgaaaagtgccacctgacgtctaagaaaccattattatcatgacattaacctataaaaataggcgtatcacgaggccctttcgtc

SEQ ID NO: 21 - DNA, 4806 bp, Artificial Sequence
  pLMTB6906
tcgcgcgtttcggtgatgacggtgaaaacctctgacacatgcagctcccggagacggtcacagcttgtctgtaagcggatgccgggagcagacaagcccgtcagggcgcgtcagcgggtgttggcgggtgtcggggctggcttaactatgcggcatcagagcagattgtactgagagtgcaccatatgcggtgtgaaataccgcacagatgcgtaaggagaaaataccgcatcaggcgccattcgccattcaggctgcgcaactgttgggaagggcgatcggtgcgggcctcttcgctattacgccagctggcgaaagggggatgtgctgcaaggcgattaagttgggtaacgccagggttttcccagtcacgacgttgtaaaacgacggccagtgaattgacgcgtattgggatatttaaatggtacctccgccacagccgcgacaagaagaacgagccgaacccgcagcgcttcgaccgcatcgcgcacacgaaggagacgatgctgagcgacggcctgaacagcctgacgtaccaggtgctggacgtgcagcgctacccgctgtacacgcagatcacggtggacatcggcacgccgagctggtcccacccgcagttcgagaagtaacctcctcctcctttcttgttcctttcacgtcgccttctcggttgtagctggcagacgacgagtcttacttttacgtgtacttctctatagatgatgtatgatctctctgcatgcgtgttcgtgcatgtgtccgtgtgttgtgtacgcgtgcgtctcgcctcagctctccgcgtgaaagggtttgactgcccatgatgcgtgtgtatatccacgcgcaggcacgcacacacacacacacacacacacacacaggcacacacaggcacacaaacgcatctcaggccgagccgcatacgtctctcgcacggtctcgtttatttgatcatgtagttgagtattaaattgggaagacaaaaacataatagcacgaagagtcgggcacgaaaagcccgatctctctctctctctctcgtgcgcgcaggggcgtgtgggtgcacgacgacgaggacggaggggggaagggaggcataaacggatcgatcccccatcgcacatgcgggtacgagcattatctgctgtgtctggtcctttatcatatcgctacccgcccgccccccgcccccctcccccccccccccccgcggctcctgtcactgtcgttcctgcgactccccacacacccgcgcaacgctcatgtcacgaagagaaaagtagaaggcgtggcgatgcgttgcgcggccccctgtccgctggcatgcagacgtcgagccgtggaacggatggtagcgagagacaacgcggcgatgcaggaaaggagatttactgcaggacgtctacacacgcgcgcacaccactgcgaatggcaccgtgctgaggaaaattgggggggagggcgcacgggggcggggcaggaaacggttggatcagcagcactctcaacttgtgtccgtattgcgaaggagggagaggagcctgcccgtattatgggcgctgaaacgtcggaaccacctatgaatcccacttctgcgtcgcggaggcgtactgcttccgaccacctccgcagctcacgcgcgtcgagctccctccctttccccttctttccgttgtgtgtgtgtgtgtgtgtgtgtcttgtcacgatgcatggccatctctcctccaaccctccacgccttcctctcccccgcccatcaaacgcgctacggccacaaccatttcttcaagtatcacatccaccaccactcttacccacctaccctcttcgactctgacacagccactgacgccctctccgcctctctcgctcgctgcacattgactctccacagccccccctccctcgcacagccagccccacccacccacccacccacccaccgctctacacacctccacagcagccatgaaaaagcctgaactcaccgcgacgtctgtcgagaagtttctgatcgaaaagttcgacagcgtctccgacctgatgcagctctcggagggcgaagaatctcgtgctttcagcttcgatgtaggagggcgtggatatgtcctgcgggtaaatagctgcgccgatggtttctacaaagatcgttatgtttatcggcactttgcatcggccgcgctcccgattccggaagtgcttgacattggggaattcagcgagagcctgacctattgcatctcccgccgtgcacagggtgtcacgttgcaagacctgcctgaaaccgaactgcccgctgttctgcagccggtcgcggaggcgatggatgcgatcgctgcggccgatcttagccagacgagcgggttcggcccattcggaccgcaaggaatcggtcaatacactacatggcgtgatttcatatgcgcgattgctgatccccatgtgtatcactggcaaactgtgatggacgacaccgtcagtgcgtccgtcgcgcaggctctcgatgagctgatgctttgggccgaggactgccccgaagtccggcacctcgtgcacgcggatttcggctccaacaatgtccggtaccatttaaatatcccaatggcgcgccgagcttggctcgagcatggtcatagctgtttcctgtgtgaaattgttatccgctcacaattccacacaacatacgagccggaagcataaagtgtaaagcctggggtgcctaatgagtgagctaactcacattaattgcgttgcgctcactgcccgctttccagtcgggaaacctgtcgtgccagctgcattaatgaatcggccaacgcgcggggagaggcggtttgcgtattgggcgctcttccgcttcctcgctcactgactcgctgcgctcggtcgttcggctgcggcgagcggtatcagctcactcaaaggcggtaatacggttatccacagaatcaggggataacgcaggaaagaacatgtgagcaaaaggccagcaaaaggccaggaaccgtaaaaaggccgcgttgctggcgtttttccataggctccgcccccctgacgagcatcacaaaaatcgacgctcaagtcagaggtggcgaaacccgacaggactataaagataccaggcgtttccccctggaagctccctcgtgcgctctcctgttccgaccctgccgcttaccggatacctgtccgcctttctcccttcgggaagcgtggcgctttctcatagctcacgctgtaggtatctcagttcggtgtaggtcgttcgctccaagctgggctgtgtgcacgaaccccccgttcagcccgaccgctgcgccttatccggtaactatcgtcttgagtccaacccggtaagacacgacttatcgccactggcagcagccactggtaacaggattagcagagcgaggtatgtaggcggtgctacagagttcttgaagtggtggcctaactacggctacactagaagaacagtatttggtatctgcgctctgctgaagccagttaccttcggaaaaagagttggtagctcttgatccggcaaacaaaccaccgctggtagcggtggtttttttgtttgcaagcagcagattacgcgcagaaaaaaaggatctcaagaagatcctttgatcttttctacggggtctgacgctcagtggaacgaaaactcacgttaagggattttggtcatgagattatcaaaaaggatcttcacctagatccttttaaattaaaaatgaagttttaaatcaatctaaagtatatatgagtaaacttggtctgacagttagaaaaactcatcgagcatcaaatgaaactgcaatttattcatatcaggattatcaataccatatttttgaaaaagccgtttctgtaatgaaggagaaaactcaccgaggcagttccataggatggcaagatcctggtatcggtctgcgattccgactcgtccaacatcaatacaacctattaatttcccctcgtcaaaaataaggttatcaagtgagaaatcaccatgagtgacgactgaatccggtgagaatggcaaaagtttatgcatttctttccagacttgttcaacaggccagccattacgctcgtcatcaaaatcactcgcatcaaccaaaccgttattcattcgtgattgcgcctgagcgagacgaaatacgcgatcgctgttaaaaggacaattacaaacaggaatcgaatgcaaccggcgcaggaacactgccagcgcatcaacaatattttcacctgaatcaggatattcttctaatacctggaatgctgttttcccagggatcgcagtggtgagtaaccatgcatcatcaggagtacggataaaatgcttgatggtcggaagaggcataaattccgtcagccagtttagtctgaccatctcatctgtaacatcattggcaacgctacctttgccatgtttcagaaacaactctggcgcatcgggcttcccatacaatcgatagattgtcgcacctgattgcccgacattatcgcgagcccatttatacccatataaatcagcatccatgttggaatttaatcgcggcctagagcaagacgtttcccgttgaatatggctcatactcttcctttttcaatattattgaagcatttatcagggttattgtctcatgagcggatacatatttgaatgtatttagaaaaataaacaaataggggttccgcgcacatttccccgaaaagtgccacctgacgtctaagaaaccattattatcatgacattaacctataaaaataggcgtatcacgaggccctttcgtc

SEQ ID NO: 22 - DNA, 4391 bp, Artificial Sequence
  pLMTB6924
tcgcgcgtttcggtgatgacggtgaaaacctctgacacatgcagctcccggagacggtcacagcttgtctgtaagcggatgccgggagcagacaagcccgtcagggcgcgtcagcgggtgttggcgggtgtcggggctggcttaactatgcggcatcagagcagattgtactgagagtgcaccatatgcggtgtgaaataccgcacagatgcgtaaggagaaaataccgcatcaggcgccattcgccattcaggctgcgcaactgttgggaagggcgatcggtgcgggcctcttcgctattacgccagctggcgaaagggggatgtgctgcaaggcgattaagttgggtaacgccagggttttcccagtcacgacgttgtaaaacgacggccagtgaattgacgcgtattgggatatttaaatggtacccgcaaggaatcggtcaatacactacatggcgtgatttcatatgcgcgattgctgatccccatgtgtatcactggcaaactgtgatggacgacaccgtcagtgcgtccgtcgcgcaggctctcgatgagctgatgctttgggccgaggactgccccgaagtccggcacctcgtgcacgcggatttcggctccaacaatgtcctgacggacaatggccgcataacagcggtcattgactggagcgaggcgatgttcggggattcccaatacgaggtcgccaacatcttcttctggaggccgtggttggcttgtatggagcagcagacgcgctacttcgagcggaggcatccggagcttgcaggatcgccgcggctccgggcgtatatgctccgcattggtcttgaccaactctatcagagcttggttgacggcaatttcgatgatgcagcttgggcgcagggtcgatgcgacgcaatcgtccgatccggagccgggactgtcgggcgtacacaaatcgcccgcagaagcgcggccgtctggaccgatggctgtgtagaagtactcgccgatagtggaaaccgacgccccagcactcgtccgagggcaaaggaatagctagcctcggagatccactagttctagttctaggggccgaattcagatcctcgtgtgagcgttcgcggaatcggtcgctcgtgtttatgcccgtcttggtgttgtgctcgcaaggcggtgcagcaggataccgtcgccctcctctctccttgcttctctgttcttcaattcgcgatctcacagaggccggctgtgcacgcccttcctcaccctccttttcccacctctcggccaccggtcggctccgttccgtctgccgtcgagaagggacgggcatgtgcagctcctccctttctctcgcgcgcgcatcttctcttgcttgtggcactcacgctcatgcgtcaaggcggccccacgccgagcccctgcgctcccttccctcttgcgcatccgtagcgcggatgccgtcgatgcgcaaggccggcatgaaggagcgcgtgccctcaagagggcacactatcatgccctacgtgggccacgcagcgatgaggccggcttcggcggagatgcgtcacgcacgtgccagatgatgcgctacgccttccttgacttgcgcccccctctcttcctccgtctctcactctctctctctcacacacacacacacacacacacacacacaatagcacgcatctaccaacgcagaacagcggctgaagagggtaacaggtacagagccatcagtctcgctgaacgaggctgtcgcaacgttgctcaggtccgcctgcaccgtaatggcactgttgggtcgccttgcgttgagcgtcgcagccagtgtgctcgcgtctgctgcagagcggtgatagtgcaagcagacagtgtacccttccgcgtggagggcctcagcgatgctgctaccaagtcgcttcgcggcgccggttaccaatgccacgggcgcagtcggagaagtcgtcatgaatccgccaattcggcacctcagcagtacagcagcgcccccgaaggaaaatagacacggctggcgcggcaccaagaaatccctacgagaaaatcttctcgatgcagttaagaaagtggacggactaggtgatacaaagctgcagagatgaaggcgaggcggagggcagtgggggcaacatgtgaaacaacggaagcgcttcgtctcggtaccatttaaatatcccaatggcgcgccgagcttggctcgagcatggtcatagctgtttcctgtgtgaaattgttatccgctcacaattccacacaacatacgagccggaagcataaagtgtaaagcctggggtgcctaatgagtgagctaactcacattaattgcgttgcgctcactgcccgctttccagtcgggaaacctgtcgtgccagctgcattaatgaatcggccaacgcgcggggagaggcggtttgcgtattgggcgctcttccgcttcctcgctcactgactcgctgcgctcggtcgttcggctgcggcgagcggtatcagctcactcaaaggcggtaatacggttatccacagaatcaggggataacgcaggaaagaacatgtgagcaaaaggccagcaaaaggccaggaaccgtaaaaaggccgcgttgctggcgtttttccataggctccgcccccctgacgagcatcacaaaaatcgacgctcaagtcagaggtggcgaaacccgacaggactataaagataccaggcgtttccccctggaagctccctcgtgcgctctcctgttccgaccctgccgcttaccggatacctgtccgcctttctcccttcgggaagcgtggcgctttctcatagctcacgctgtaggtatctcagttcggtgtaggtcgttcgctccaagctgggctgtgtgcacgaaccccccgttcagcccgaccgctgcgccttatccggtaactatcgtcttgagtccaacccggtaagacacgacttatcgccactggcagcagccactggtaacaggattagcagagcgaggtatgtaggcggtgctacagagttcttgaagtggtggcctaactacggctacactagaagaacagtatttggtatctgcgctctgctgaagccagttaccttcggaaaaagagttggtagctcttgatccggcaaacaaaccaccgctggtagcggtggtttttttgtttgcaagcagcagattacgcgcagaaaaaaaggatctcaagaagatcctttgatcttttctacggggtctgacgctcagtggaacgaaaactcacgttaagggattttggtcatgagattatcaaaaaggatcttcacctagatccttttaaattaaaaatgaagttttaaatcaatctaaagtatatatgagtaaacttggtctgacagttagaaaaactcatcgagcatcaaatgaaactgcaatttattcatatcaggattatcaataccatatttttgaaaaagccgtttctgtaatgaaggagaaaactcaccgaggcagttccataggatggcaagatcctggtatcggtctgcgattccgactcgtccaacatcaatacaacctattaatttcccctcgtcaaaaataaggttatcaagtgagaaatcaccatgagtgacgactgaatccggtgagaatggcaaaagtttatgcatttctttccagacttgttcaacaggccagccattacgctcgtcatcaaaatcactcgcatcaaccaaaccgttattcattcgtgattgcgcctgagcgagacgaaatacgcgatcgctgttaaaaggacaattacaaacaggaatcgaatgcaaccggcgcaggaacactgccagcgcatcaacaatattttcacctgaatcaggatattcttctaatacctggaatgctgttttcccagggatcgcagtggtgagtaaccatgcatcatcaggagtacggataaaatgcttgatggtcggaagaggcataaattccgtcagccagtttagtctgaccatctcatctgtaacatcattggcaacgctacctttgccatgtttcagaaacaactctggcgcatcgggcttcccatacaatcgatagattgtcgcacctgattgcccgacattatcgcgagcccatttatacccatataaatcagcatccatgttggaatttaatcgcggcctagagcaagacgtttcccgttgaatatggctcatactcttcctttttcaatattattgaagcatttatcagggttattgtctcatgagcggatacatatttgaatgtatttagaaaaataaacaaataggggttccgcgcacatttccccgaaaagtgccacctgacgtctaagaaaccattattatcatgacattaacctataaaaataggcgtatcacgaggccctttcgtc

SEQ ID NO: 23 - DNA, 4391 bp, Artificial Sequence
  pLMTB6933
tcgcgcgtttcggtgatgacggtgaaaacctctgacacatgcagctcccggagacggtcacagcttgtctgtaagcggatgccgggagcagacaagcccgtcagggcgcgtcagcgggtgttggcgggtgtcggggctggcttaactatgcggcatcagagcagattgtactgagagtgcaccatatgcggtgtgaaataccgcacagatgcgtaaggagaaaataccgcatcaggcgccattcgccattcaggctgcgcaactgttgggaagggcgatcggtgcgggcctcttcgctattacgccagctggcgaaagggggatgtgctgcaaggcgattaagttgggtaacgccagggttttcccagtcacgacgttgtaaaacgacggccagtgaattgacgcgtattgggatatttaaatggtacccgcaaggaatcggtcaatacactacatggcgtgatttcatatgcgcgattgctgatccccatgtgtatcactggcaaactgtgatggacgacaccgtcagtgcgtccgtcgcgcaggctctcgatgagctgatgctttgggccgaggactgccccgaagtccggcacctcgtgcacgcggatttcggctccaacaatgtcctgacggacaatggccgcataacagcggtcattgactggagcgaggcgatgttcggggattcccaatacgaggtcgccaacatcttcttctggaggccgtggttggcttgtatggagcagcagacgcgctacttcgagcggaggcatccggagcttgcaggatcgccgcggctccgggcgtatatgctccgcattggtcttgaccaactctatcagagcttggttgacggcaatttcgatgatgcagcttgggcgcagggtcgatgcgacgcaatcgtccgatccggagccgggactgtcgggcgtacacaaatcgcccgcagaagcgcggccgtctggaccgatggctgtgtagaagtactcgccgatagtggaaaccgacgccccagcactcgtccgagggcaaaggaatagctagcctcggagatccactagttctagttctaggggccgaattcagatcctcgtgtgagcgttcgcggaatcggtcgctcgtgtttatgcccgtcttggtgttgtgctcgcaaggcggtgcagcaggataccgtcgccctcctctctccttgcttctctgttcttcaattcgcgatctcacagaggccggctgtgcacgcccttcctcaccctccttttcccacctctcggccaccggtcggctccgttccgtctgccgtcgagaagggacgggcatgtgcagctcctccctttctctcgcgcgcgcatcttctcttgcttgtggcactcacgctcatgcgtcaaggcggccccacgccgagcccctgcgctcccttccctcttgcgcatccgtagcgcggatgccgtcgatgcgcaaggccggcatgaaggagcgcgtgccctcaagagggcacactatcatgccctacgtgggccacgcagcgatgaggccggcttcggcggagatgcgtcacgcacgtgccagatgatgcgctacgccttccttgacttgcgcccccctctcttcctccgtctctcactctctctctctcacacacacacacacacacacacacacacaaatgtccgtcgacagcagcagcacgcaccggcgccgcagcgtcgccgcgcgcctggtgcgcctcgcggctgccagcgctgcagccgccgttgcccttgccacagccgccgcgtgggcgcacggcgatgcggcccagcaccgctgcatccacgacagcatgcaggcccgtgttgtgcagtctgtggcggagcagcgcctcgaccccagcagggttgctcccgtcggcctgccctacgttgccgtggacgccgacgataccgccgctgagaggagcagcggcgtgcacactaagcagtggggcacgccgcgcatcgccgttttcacctatgacttcacggacgaacactatttctgtagtcgtgtggggcagaatgtgagcatgcgcaacggcaactttgccatctgcacagccgacgacgtcctcacgtacgagaagcgcgacataatcagggatttcatcttcccgcaggcactgcagctgcacacgaggcggctgaaggtggtaccatttaaatatcccaatggcgcgccgagcttggctcgagcatggtcatagctgtttcctgtgtgaaattgttatccgctcacaattccacacaacatacgagccggaagcataaagtgtaaagcctggggtgcctaatgagtgagctaactcacattaattgcgttgcgctcactgcccgctttccagtcgggaaacctgtcgtgccagctgcattaatgaatcggccaacgcgcggggagaggcggtttgcgtattgggcgctcttccgcttcctcgctcactgactcgctgcgctcggtcgttcggctgcggcgagcggtatcagctcactcaaaggcggtaatacggttatccacagaatcaggggataacgcaggaaagaacatgtgagcaaaaggccagcaaaaggccaggaaccgtaaaaaggccgcgttgctggcgtttttccataggctccgcccccctgacgagcatcacaaaaatcgacgctcaagtcagaggtggcgaaacccgacaggactataaagataccaggcgtttccccctggaagctccctcgtgcgctctcctgttccgaccctgccgcttaccggatacctgtccgcctttctcccttcgggaagcgtggcgctttctcatagctcacgctgtaggtatctcagttcggtgtaggtcgttcgctccaagctgggctgtgtgcacgaaccccccgttcagcccgaccgctgcgccttatccggtaactatcgtcttgagtccaacccggtaagacacgacttatcgccactggcagcagccactggtaacaggattagcagagcgaggtatgtaggcggtgctacagagttcttgaagtggtggcctaactacggctacactagaagaacagtatttggtatctgcgctctgctgaagccagttaccttcggaaaaagagttggtagctcttgatccggcaaacaaaccaccgctggtagcggtggtttttttgtttgcaagcagcagattacgcgcagaaaaaaaggatctcaagaagatcctttgatcttttctacggggtctgacgctcagtggaacgaaaactcacgttaagggattttggtcatgagattatcaaaaaggatcttcacctagatccttttaaattaaaaatgaagttttaaatcaatctaaagtatatatgagtaaacttggtctgacagttagaaaaactcatcgagcatcaaatgaaactgcaatttattcatatcaggattatcaataccatatttttgaaaaagccgtttctgtaatgaaggagaaaactcaccgaggcagttccataggatggcaagatcctggtatcggtctgcgattccgactcgtccaacatcaatacaacctattaatttcccctcgtcaaaaataaggttatcaagtgagaaatcaccatgagtgacgactgaatccggtgagaatggcaaaagtttatgcatttctttccagacttgttcaacaggccagccattacgctcgtcatcaaaatcactcgcatcaaccaaaccgttattcattcgtgattgcgcctgagcgagacgaaatacgcgatcgctgttaaaaggacaattacaaacaggaatcgaatgcaaccggcgcaggaacactgccagcgcatcaacaatattttcacctgaatcaggatattcttctaatacctggaatgctgttttcccagggatcgcagtggtgagtaaccatgcatcatcaggagtacggataaaatgcttgatggtcggaagaggcataaattccgtcagccagtttagtctgaccatctcatctgtaacatcattggcaacgctacctttgccatgtttcagaaacaactctggcgcatcgggcttcccatacaatcgatagattgtcgcacctgattgcccgacattatcgcgagcccatttatacccatataaatcagcatccatgttggaatttaatcgcggcctagagcaagacgtttcccgttgaatatggctcatactcttcctttttcaatattattgaagcatttatcagggttattgtctcatgagcggatacatatttgaatgtatttagaaaaataaacaaataggggttccgcgcacatttccccgaaaagtgccacctgacgtctaagaaaccattattatcatgacattaacctataaaaataggcgtatcacgaggccctttcgtc

SEQ ID NO: 24 - DNA, 4178 bp, Artificial Sequence
  pLMTB6936
tcgcgcgtttcggtgatgacggtgaaaacctctgacacatgcagctcccggagacggtcacagcttgtctgtaagcggatgccgggagcagacaagcccgtcagggcgcgtcagcgggtgttggcgggtgtcggggctggcttaactatgcggcatcagagcagattgtactgagagtgcaccatatgcggtgtgaaataccgcacagatgcgtaaggagaaaataccgcatcaggcgccattcgccattcaggctgcgcaactgttgggaagggcgatcggtgcgggcctcttcgctattacgccagctggcgaaagggggatgtgctgcaaggcgattaagttgggtaacgccagggttttcccagtcacgacgttgtaaaacgacggccagtgaattgacgcgtattgggatatttaaatggtacccagacgacggcgcagcggtggcagtgtggacgacaccagagagcgtcgaggcaggcgcggtgttcgcagagattggcccacgcatggcggagctgagcggcagccgcctggcagcacagcagcagatggagggcctgctggcaccgcaccgcccaaaggagccagcctggtttctggcgacagtgggcgtgtccccggaccaccagggcaagggcctgggcagcgcagtggtgctcccaggcgtcgaggctgcagagcgcgcaggcgtgccggcattcctggagacaagcgcgccacgcaacctgccgttctacgagcgcctgggcttcaccgtgacggcggacgtcgaggtgccagagggcccacgcacatggtgcatgacacgcaagccaggcgcgtagctagcctcggagatccactagttctagttctaggggccgaattcagatcctcgtgtgagcgttcgcggaatcggtcgctcgtgtttatgcccgtcttggtgttgtgctcgcaaggcggtgcagcaggataccgtcgccctcctctctccttgcttctctgttcttcaattcgcgatctcacagaggccggctgtgcacgcccttcctcaccctccttttcccacctctcggccaccggtcggctccgttccgtctgccgtcgagaagggacgggcatgtgcagctcctccctttctctcgcgcgcgcatcttctcttgcttgtggcactcacgctcatgcgtcaaggcggccccacgccgagcccctgcgctcccttccctcttgcgcatccgtagcgcggatgccgtcgatgcgcaaggccggcatgaaggagcgcgtgccctcaagagggcacactatcatgccctacgtgggccacgcagcgatgaggccggcttcggcggagatgcgtcacgcacgtgccagatgatgcgctacgccttccttgacttgcgcccccctctcttcctccgtctctcactctctctctctcacacacacacacacacacacacacacacaaatgtccgtcgacagcagcagcacgcaccggcgccgcagcgtcgccgcgcgcctggtgcgcctcgcggctgccagcgctgcagccgccgttgcccttgccacagccgccgcgtgggcgcacggcgatgcggcccagcaccgctgcatccacgacagcatgcaggcccgtgttgtgcagtctgtggcggagcagcgcctcgaccccagcagggttgctcccgtcggcctgccctacgttgccgtggacgccgacgataccgccgctgagaggagcagcggcgtgcacactaagcagtggggcacgccgcgcatcgccgttttcacctatgacttcacggacgaacactatttctgtagtcgtgtggggcagaatgtgagcatgcgcaacggcaactttgccatctgcacagccgacgacgtcctcacgtacgagaagcgcgacataatcagggatttcatcttcccgcaggcactgcagctgcacacgaggcggctgaaggtggtaccatttaaatatcccaatggcgcgccgagcttggctcgagcatggtcatagctgtttcctgtgtgaaattgttatccgctcacaattccacacaacatacgagccggaagcataaagtgtaaagcctggggtgcctaatgagtgagctaactcacattaattgcgttgcgctcactgcccgctttccagtcgggaaacctgtcgtgccagctgcattaatgaatcggccaacgcgcggggagaggcggtttgcgtattgggcgctcttccgcttcctcgctcactgactcgctgcgctcggtcgttcggctgcggcgagcggtatcagctcactcaaaggcggtaatacggttatccacagaatcaggggataacgcaggaaagaacatgtgagcaaaaggccagcaaaaggccaggaaccgtaaaaaggccgcgttgctggcgtttttccataggctccgcccccctgacgagcatcacaaaaatcgacgctcaagtcagaggtggcgaaacccgacaggactataaagataccaggcgtttccccctggaagctccctcgtgcgctctcctgttccgaccctgccgcttaccggatacctgtccgcctttctcccttcgggaagcgtggcgctttctcatagctcacgctgtaggtatctcagttcggtgtaggtcgttcgctccaagctgggctgtgtgcacgaaccccccgttcagcccgaccgctgcgccttatccggtaactatcgtcttgagtccaacccggtaagacacgacttatcgccactggcagcagccactggtaacaggattagcagagcgaggtatgtaggcggtgctacagagttcttgaagtggtggcctaactacggctacactagaagaacagtatttggtatctgcgctctgctgaagccagttaccttcggaaaaagagttggtagctcttgatccggcaaacaaaccaccgctggtagcggtggtttttttgtttgcaagcagcagattacgcgcagaaaaaaaggatctcaagaagatcctttgatcttttctacggggtctgacgctcagtggaacgaaaactcacgttaagggattttggtcatgagattatcaaaaaggatcttcacctagatccttttaaattaaaaatgaagttttaaatcaatctaaagtatatatgagtaaacttggtctgacagttagaaaaactcatcgagcatcaaatgaaactgcaatttattcatatcaggattatcaataccatatttttgaaaaagccgtttctgtaatgaaggagaaaactcaccgaggcagttccataggatggcaagatcctggtatcggtctgcgattccgactcgtccaacatcaatacaacctattaatttcccctcgtcaaaaataaggttatcaagtgagaaatcaccatgagtgacgactgaatccggtgagaatggcaaaagtttatgcatttctttccagacttgttcaacaggccagccattacgctcgtcatcaaaatcactcgcatcaaccaaaccgttattcattcgtgattgcgcctgagcgagacgaaatacgcgatcgctgttaaaaggacaattacaaacaggaatcgaatgcaaccggcgcaggaacactgccagcgcatcaacaatattttcacctgaatcaggatattcttctaatacctggaatgctgttttcccagggatcgcagtggtgagtaaccatgcatcatcaggagtacggataaaatgcttgatggtcggaagaggcataaattccgtcagccagtttagtctgaccatctcatctgtaacatcattggcaacgctacctttgccatgtttcagaaacaactctggcgcatcgggcttcccatacaatcgatagattgtcgcacctgattgcccgacattatcgcgagcccatttatacccatataaatcagcatccatgttggaatttaatcgcggcctagagcaagacgtttcccgttgaatatggctcatactcttcctttttcaatattattgaagcatttatcagggttattgtctcatgagcggatacatatttgaatgtatttagaaaaataaacaaataggggttccgcgcacatttccccgaaaagtgccacctgacgtctaagaaaccattattatcatgacattaacctataaaaataggcgtatcacgaggccctttcgtc

SEQ ID NO: 25 - DNA, 4178 bp, Artificial Sequence
  pLMTB6939
tcgcgcgtttcggtgatgacggtgaaaacctctgacacatgcagctcccggagacggtcacagcttgtctgtaagcggatgccgggagcagacaagcccgtcagggcgcgtcagcgggtgttggcgggtgtcggggctggcttaactatgcggcatcagagcagattgtactgagagtgcaccatatgcggtgtgaaataccgcacagatgcgtaaggagaaaataccgcatcaggcgccattcgccattcaggctgcgcaactgttgggaagggcgatcggtgcgggcctcttcgctattacgccagctggcgaaagggggatgtgctgcaaggcgattaagttgggtaacgccagggttttcccagtcacgacgttgtaaaacgacggccagtgaattgacgcgtattgggatatttaaatggtacccagacgacggcgcagcggtggcagtgtggacgacaccagagagcgtcgaggcaggcgcggtgttcgcagagattggcccacgcatggcggagctgagcggcagccgcctggcagcacagcagcagatggagggcctgctggcaccgcaccgcccaaaggagccagcctggtttctggcgacagtgggcgtgtccccggaccaccagggcaagggcctgggcagcgcagtggtgctcccaggcgtcgaggctgcagagcgcgcaggcgtgccggcattcctggagacaagcgcgccacgcaacctgccgttctacgagcgcctgggcttcaccgtgacggcggacgtcgaggtgccagagggcccacgcacatggtgcatgacacgcaagccaggcgcgtagctagcctcggagatccactagttctagttctaggggccgaattcagatcctcgtgtgagcgttcgcggaatcggtcgctcgtgtttatgcccgtcttggtgttgtgctcgcaaggcggtgcagcaggataccgtcgccctcctctctccttgcttctctgttcttcaattcgcgatctcacagaggccggctgtgcacgcccttcctcaccctccttttcccacctctcggccaccggtcggctccgttccgtctgccgtcgagaagggacgggcatgtgcagctcctccctttctctcgcgcgcgcatcttctcttgcttgtggcactcacgctcatgcgtcaaggcggccccacgccgagcccctgcgctcccttccctcttgcgcatccgtagcgcggatgccgtcgatgcgcaaggccggcatgaaggagcgcgtgccctcaagagggcacactatcatgccctacgtgggccacgcagcgatgaggccggcttcggcggagatgcgtcacgcacgtgccagatgatgcgctacgccttccttgacttgcgcccccctctcttcctccgtctctcactctctctctctcacacacacacacacacacacacacacacaaatgcgtgaggctatctgcatccacatcggccaggccggctgccaggtcggtaacgcgtgctgggagctgttctgccttgagcacggcatccagcctgatggctccatgccctctgacaagtgcatcggtgttgaggatgacgcgttcaacacgttcttctcggagactggcgccggcaagcacgttcctcgctgcctcttcctggacctggagcccacggtcgtggatgaggtgcgcaccggcacgtaccgccagctgttcaaccccgagcagctggtgtctggcaaggaggatgcggcgaacaactacgctcgtggccactacacgatcggcaaggagatcgtcgaccttgcgctggaccgcattcgcaagctggcggacaactgcactggtctccagggctttatggtgttccacgcggtgggtggcggcacgggctctggcctcggtgcgctgctgctggagcgcctgtctgtggactacggcaagaagtcgaagctggtaccatttaaatatcccaatggcgcgccgagcttggctcgagcatggtcatagctgtttcctgtgtgaaattgttatccgctcacaattccacacaacatacgagccggaagcataaagtgtaaagcctggggtgcctaatgagtgagctaactcacattaattgcgttgcgctcactgcccgctttccagtcgggaaacctgtcgtgccagctgcattaatgaatcggccaacgcgcggggagaggcggtttgcgtattgggcgctcttccgcttcctcgctcactgactcgctgcgctcggtcgttcggctgcggcgagcggtatcagctcactcaaaggcggtaatacggttatccacagaatcaggggataacgcaggaaagaacatgtgagcaaaaggccagcaaaaggccaggaaccgtaaaaaggccgcgttgctggcgtttttccataggctccgcccccctgacgagcatcacaaaaatcgacgctcaagtcagaggtggcgaaacccgacaggactataaagataccaggcgtttccccctggaagctccctcgtgcgctctcctgttccgaccctgccgcttaccggatacctgtccgcctttctcccttcgggaagcgtggcgctttctcatagctcacgctgtaggtatctcagttcggtgtaggtcgttcgctccaagctgggctgtgtgcacgaaccccccgttcagcccgaccgctgcgccttatccggtaactatcgtcttgagtccaacccggtaagacacgacttatcgccactggcagcagccactggtaacaggattagcagagcgaggtatgtaggcggtgctacagagttcttgaagtggtggcctaactacggctacactagaagaacagtatttggtatctgcgctctgctgaagccagttaccttcggaaaaagagttggtagctcttgatccggcaaacaaaccaccgctggtagcggtggtttttttgtttgcaagcagcagattacgcgcagaaaaaaaggatctcaagaagatcctttgatcttttctacggggtctgacgctcagtggaacgaaaactcacgttaagggattttggtcatgagattatcaaaaaggatcttcacctagatccttttaaattaaaaatgaagttttaaatcaatctaaagtatatatgagtaaacttggtctgacagttagaaaaactcatcgagcatcaaatgaaactgcaatttattcatatcaggattatcaataccatatttttgaaaaagccgtttctgtaatgaaggagaaaactcaccgaggcagttccataggatggcaagatcctggtatcggtctgcgattccgactcgtccaacatcaatacaacctattaatttcccctcgtcaaaaataaggttatcaagtgagaaatcaccatgagtgacgactgaatccggtgagaatggcaaaagtttatgcatttctttccagacttgttcaacaggccagccattacgctcgtcatcaaaatcactcgcatcaaccaaaccgttattcattcgtgattgcgcctgagcgagacgaaatacgcgatcgctgttaaaaggacaattacaaacaggaatcgaatgcaaccggcgcaggaacactgccagcgcatcaacaatattttcacctgaatcaggatattcttctaatacctggaatgctgttttcccagggatcgcagtggtgagtaaccatgcatcatcaggagtacggataaaatgcttgatggtcggaagaggcataaattccgtcagccagtttagtctgaccatctcatctgtaacatcattggcaacgctacctttgccatgtttcagaaacaactctggcgcatcgggcttcccatacaatcgatagattgtcgcacctgattgcccgacattatcgcgagcccatttatacccatataaatcagcatccatgttggaatttaatcgcggcctagagcaagacgtttcccgttgaatatggctcatactcttcctttttcaatattattgaagcatttatcagggttattgtctcatgagcggatacatatttgaatgtatttagaaaaataaacaaataggggttccgcgcacatttccccgaaaagtgccacctgacgtctaagaaaccattattatcatgacattaacctataaaaataggcgtatcacgaggccctttcgtc

SEQ ID NO: 26 - DNA, 4077 bp, Artificial Sequence
  pLMTB6940
tcgcgcgtttcggtgatgacggtgaaaacctctgacacatgcagctcccggagacggtcacagcttgtctgtaagcggatgccgggagcagacaagcccgtcagggcgcgtcagcgggtgttggcgggtgtcggggctggcttaactatgcggcatcagagcagattgtactgagagtgcaccatatgcggtgtgaaataccgcacagatgcgtaaggagaaaataccgcatcaggcgccattcgccattcaggctgcgcaactgttgggaagggcgatcggtgcgggcctcttcgctattacgccagctggcgaaagggggatgtgctgcaaggcgattaagttgggtaacgccagggttttcccagtcacgacgttgtaaaacgacggccagtgaattgacgcgtattgggatatttaaatggtaccgcagctctctctagcgacggccgcatcttcactggtgtcaatgtatatcattttactgggggaccttgtgcagaactcgtggtgctgggcactgctgctgctgcggcagctggcaacctgacttgtatcgtcgcgatcggaaatgagaacaggggcatcttgagcccctgcggacggtgccgacaggtgcttctcgatctgcatcctgggatcaaagccatagtgaaggacagtgatggacagccgacggcagttgggattcgtgaattgctgccctctggttatgtgtgggagggctaactagcctcggagatccactagttctagttctaggggccgaattcagatcctcgtgtgagcgttcgcggaatcggtcgctcgtgtttatgcccgtcttggtgttgtgctcgcaaggcggtgcagcaggataccgtcgccctcctctctccttgcttctctgttcttcaattcgcgatctcacagaggccggctgtgcacgcccttcctcaccctccttttcccacctctcggccaccggtcggctccgttccgtctgccgtcgagaagggacgggcatgtgcagctcctccctttctctcgcgcgcgcatcttctcttgcttgtggcactcacgctcatgcgtcaaggcggccccacgccgagcccctgcgctcccttccctcttgcgcatccgtagcgcggatgccgtcgatgcgcaaggccggcatgaaggagcgcgtgccctcaagagggcacactatcatgccctacgtgggccacgcagcgatgaggccggcttcggcggagatgcgtcacgcacgtgccagatgatgcgctacgccttccttgacttgcgcccccctctcttcctccgtctctcactctctctctctcacacacacacacacacacacacacacacaaatgcgtgaggctatctgcatccacatcggccaggccggctgccaggtcggtaacgcgtgctgggagctgttctgccttgagcacggcatccagcctgatggctccatgccctctgacaagtgcatcggtgttgaggatgacgcgttcaacacgttcttctcggagactggcgccggcaagcacgttcctcgctgcctcttcctggacctggagcccacggtcgtggatgaggtgcgcaccggcacgtaccgccagctgttcaaccccgagcagctggtgtctggcaaggaggatgcggcgaacaactacgctcgtggccactacacgatcggcaaggagatcgtcgaccttgcgctggaccgcattcgcaagctggcggacaactgcactggtctccagggctttatggtgttccacgcggtgggtggcggcacgggctctggcctcggtgcgctgctgctggagcgcctgtctgtggactacggcaagaagtcgaagctggtaccatttaaatatcccaatggcgcgccgagcttggctcgagcatggtcatagctgtttcctgtgtgaaattgttatccgctcacaattccacacaacatacgagccggaagcataaagtgtaaagcctggggtgcctaatgagtgagctaactcacattaattgcgttgcgctcactgcccgctttccagtcgggaaacctgtcgtgccagctgcattaatgaatcggccaacgcgcggggagaggcggtttgcgtattgggcgctcttccgcttcctcgctcactgactcgctgcgctcggtcgttcggctgcggcgagcggtatcagctcactcaaaggcggtaatacggttatccacagaatcaggggataacgcaggaaagaacatgtgagcaaaaggccagcaaaaggccaggaaccgtaaaaaggccgcgttgctggcgtttttccataggctccgcccccctgacgagcatcacaaaaatcgacgctcaagtcagaggtggcgaaacccgacaggactataaagataccaggcgtttccccctggaagctccctcgtgcgctctcctgttccgaccctgccgcttaccggatacctgtccgcctttctcccttcgggaagcgtggcgctttctcatagctcacgctgtaggtatctcagttcggtgtaggtcgttcgctccaagctgggctgtgtgcacgaaccccccgttcagcccgaccgctgcgccttatccggtaactatcgtcttgagtccaacccggtaagacacgacttatcgccactggcagcagccactggtaacaggattagcagagcgaggtatgtaggcggtgctacagagttcttgaagtggtggcctaactacggctacactagaagaacagtatttggtatctgcgctctgctgaagccagttaccttcggaaaaagagttggtagctcttgatccggcaaacaaaccaccgctggtagcggtggtttttttgtttgcaagcagcagattacgcgcagaaaaaaaggatctcaagaagatcctttgatcttttctacggggtctgacgctcagtggaacgaaaactcacgttaagggattttggtcatgagattatcaaaaaggatcttcacctagatccttttaaattaaaaatgaagttttaaatcaatctaaagtatatatgagtaaacttggtctgacagttagaaaaactcatcgagcatcaaatgaaactgcaatttattcatatcaggattatcaataccatatttttgaaaaagccgtttctgtaatgaaggagaaaactcaccgaggcagttccataggatggcaagatcctggtatcggtctgcgattccgactcgtccaacatcaatacaacctattaatttcccctcgtcaaaaataaggttatcaagtgagaaatcaccatgagtgacgactgaatccggtgagaatggcaaaagtttatgcatttctttccagacttgttcaacaggccagccattacgctcgtcatcaaaatcactcgcatcaaccaaaccgttattcattcgtgattgcgcctgagcgagacgaaatacgcgatcgctgttaaaaggacaattacaaacaggaatcgaatgcaaccggcgcaggaacactgccagcgcatcaacaatattttcacctgaatcaggatattcttctaatacctggaatgctgttttcccagggatcgcagtggtgagtaaccatgcatcatcaggagtacggataaaatgcttgatggtcggaagaggcataaattccgtcagccagtttagtctgaccatctcatctgtaacatcattggcaacgctacctttgccatgtttcagaaacaactctggcgcatcgggcttcccatacaatcgatagattgtcgcacctgattgcccgacattatcgcgagcccatttatacccatataaatcagcatccatgttggaatttaatcgcggcctagagcaagacgtttcccgttgaatatggctcatactcttcctttttcaatattattgaagcatttatcagggttattgtctcatgagcggatacatatttgaatgtatttagaaaaataaacaaataggggttccgcgcacatttccccgaaaagtgccacctgacgtctaagaaaccattattatcatgacattaacctataaaaataggcgtatcacgaggccctttcgtc

SEQ ID NO: 27 - DNA, 4451 bp, Artificial Sequence
  pLMTB6946
tcgcgcgtttcggtgatgacggtgaaaacctctgacacatgcagctcccggagacggtcacagcttgtctgtaagcggatgccgggagcagacaagcccgtcagggcgcgtcagcgggtgttggcgggtgtcggggctggcttaactatgcggcatcagagcagattgtactgagagtgcaccatatgcggtgtgaaataccgcacagatgcgtaaggagaaaataccgcatcaggcgccattcgccattcaggctgcgcaactgttgggaagggcgatcggtgcgggcctcttcgctattacgccagctggcgaaagggggatgtgctgcaaggcgattaagttgggtaacgccagggttttcccagtcacgacgttgtaaaacgacggccagtgaattgacgcgtattgggatatttaaatggtacctagccaccatcaactttgatgcacgtgccggtgatgtacttcgccttgggggagcacagaaagataacaacgtcgctcacctcctcggcggaggaattacgctggtacagaggcacctttcttcggtagtcctcctgcacagagaatggcatgtcatcggggagcaccgacaggcccggactgacgccgttcactcgaatctgcagcgacgcaagctccagcgcggcagaccgtgtgagcccctccaacgcctctttggccatggtatacatggtgtatccgagaaggggctggctcgtcatggcgtcgaccatgttgacgatcgagtagctagtgccgcgctgctcggctcgggtatccgcaacgcgctgcgcaaacgccttaatcaagaagtagggcgcaatcgcgttagagccgaagaggtcggccgcggcaacctccagtgactccttatcacccacggaggatccgccttcaccggcgtctttcctcagcagcgggcgtggggatggatcgcgagggacgcggggtttgagggccgtgggtggtgtggagagtgtggttgattattgtatggtggtgagggtggaaggtgtggcggggatggtggtgcggtggtgtcggaaggggtgtgtgagagggcgcgggtccttgagggagggtgggtgtgttgttgttttgcgggtgttatccggggcttgggtgttggtgtgattggtgactatgtaggggtgaagggtgagtggagggggtcgccagaggcgttccgttctacgaagcttcattcctatgtccgactccgaagcatgcctgcagttctgctggctatgtgggcgtgtctgggcaacgactgaattgagaaggggagtcgaaacggtgcgtggatgctgtgtttgtgctacacacaagcaaaggcaacaacacaagcgcatcgagccagacgaaccaacccaatattcacacaactgtacgtggccgcgcgctgtatctccgatgggatgatgcgtgtgcgtgtgccaccaccacgtactagtttccagccttactgcttgtataccttgtcttttgcgttgtgcttgcgcgtgctgtgtacctctgctcgtgcgttccgtatcccgggacctgcgggcggtgggtgccacacaacccgtcacattcaacatcactcatacatctcaccgatgtgtgcgtgtgcttgctgtgtgcgtgtgttgtgtggcgtcaaacctgtttgaaaacacacccctagcactattcgaccgcgaaagcgcccccccaaaggggccggtgtgcaatgcgagctacatgtatgtgtagagagcgctgcgccgaactagtcgtgcgtgctgaacatgttttgtgtgtgctgccgtgtctacacgtttgcagcggaaactcggttgaaccagaaacagaacttgattgttgctgcatttcgaggaatttcagccaaacaagaggtcaacaaccaagccgcgtgtacacatatacacacaccgcgtgtatgtatatatgcgtttgttttgttaccacaaatactgagttgtctgatgtgagcttctgctacagacgcaattcaggaaatacaacaaaatacaacacttgatcatcaatgcgcaatgtgcgcgtgttgtgtgtgtgtgtgcgagcgcacacacacatgcacacgactcacgttgtcacacaattgagagctctctcttctccttcccctctctctcctctctcctctctccagagctctctcttctccttcccctctctctcctctctcctctctccagagctcgagccaccggtaccatttaaatatcccaatggcgcgccgagcttggctcgagcatggtcatagctgtttcctgtgtgaaattgttatccgctcacaattccacacaacatacgagccggaagcataaagtgtaaagcctggggtgcctaatgagtgagctaactcacattaattgcgttgcgctcactgcccgctttccagtcgggaaacctgtcgtgccagctgcattaatgaatcggccaacgcgcggggagaggcggtttgcgtattgggcgctcttccgcttcctcgctcactgactcgctgcgctcggtcgttcggctgcggcgagcggtatcagctcactcaaaggcggtaatacggttatccacagaatcaggggataacgcaggaaagaacatgtgagcaaaaggccagcaaaaggccaggaaccgtaaaaaggccgcgttgctggcgtttttccataggctccgcccccctgacgagcatcacaaaaatcgacgctcaagtcagaggtggcgaaacccgacaggactataaagataccaggcgtttccccctggaagctccctcgtgcgctctcctgttccgaccctgccgcttaccggatacctgtccgcctttctcccttcgggaagcgtggcgctttctcatagctcacgctgtaggtatctcagttcggtgtaggtcgttcgctccaagctgggctgtgtgcacgaaccccccgttcagcccgaccgctgcgccttatccggtaactatcgtcttgagtccaacccggtaagacacgacttatcgccactggcagcagccactggtaacaggattagcagagcgaggtatgtaggcggtgctacagagttcttgaagtggtggcctaactacggctacactagaagaacagtatttggtatctgcgctctgctgaagccagttaccttcggaaaaagagttggtagctcttgatccggcaaacaaaccaccgctggtagcggtggtttttttgtttgcaagcagcagattacgcgcagaaaaaaaggatctcaagaagatcctttgatcttttctacggggtctgacgctcagtggaacgaaaactcacgttaagggattttggtcatgagattatcaaaaaggatcttcacctagatccttttaaattaaaaatgaagttttaaatcaatctaaagtatatatgagtaaacttggtctgacagttagaaaaactcatcgagcatcaaatgaaactgcaatttattcatatcaggattatcaataccatatttttgaaaaagccgtttctgtaatgaaggagaaaactcaccgaggcagttccataggatggcaagatcctggtatcggtctgcgattccgactcgtccaacatcaatacaacctattaatttcccctcgtcaaaaataaggttatcaagtgagaaatcaccatgagtgacgactgaatccggtgagaatggcaaaagtttatgcatttctttccagacttgttcaacaggccagccattacgctcgtcatcaaaatcactcgcatcaaccaaaccgttattcattcgtgattgcgcctgagcgagacgaaatacgcgatcgctgttaaaaggacaattacaaacaggaatcgaatgcaaccggcgcaggaacactgccagcgcatcaacaatattttcacctgaatcaggatattcttctaatacctggaatgctgttttcccagggatcgcagtggtgagtaaccatgcatcatcaggagtacggataaaatgcttgatggtcggaagaggcataaattccgtcagccagtttagtctgaccatctcatctgtaacatcattggcaacgctacctttgccatgtttcagaaacaactctggcgcatcgggcttcccatacaatcgatagattgtcgcacctgattgcccgacattatcgcgagcccatttatacccatataaatcagcatccatgttggaatttaatcgcggcctagagcaagacgtttcccgttgaatatggctcatactcttcctttttcaatattattgaagcatttatcagggttattgtctcatgagcggatacatatttgaatgtatttagaaaaataaacaaataggggttccgcgcacatttccccgaaaagtgccacctgacgtctaagaaaccattattatcatgacattaacctataaaaataggcgtatcacgaggccctttcgtc

SEQ ID NO: 28 - DNA, 4273 bp, Artificial Sequence
  pLMTB6950
tcgcgcgtttcggtgatgacggtgaaaacctctgacacatgcagctcccggagacggtcacagcttgtctgtaagcggatgccgggagcagacaagcccgtcagggcgcgtcagcgggtgttggcgggtgtcggggctggcttaactatgcggcatcagagcagattgtactgagagtgcaccatatgcggtgtgaaataccgcacagatgcgtaaggagaaaataccgcatcaggcgccattcgccattcaggctgcgcaactgttgggaagggcgatcggtgcgggcctcttcgctattacgccagctggcgaaagggggatgtgctgcaaggcgattaagttgggtaacgccagggttttcccagtcacgacgttgtaaaacgacggccagtgaattgacgcgtattgggatatttaaatggtaccaacacttgatcatcaatgcgcaatgtgcgcgtgttgtgtgtgtgtgtgcgagcgcacacacacatgcacacgactcacgttgtcacacaattgagagctctctcttctccttcccctctctctcctctctcctctctccagagctctctcttctccttcccctctctctcctctctcctctctccagagctcgagccaccatgcggttccggatctataagcggaaggtcctgatcctgaccctggtcgtcgccgcctgcggcttcgtcctgtggtcctccaacggccggcagcggaagaacgacgccctggccccccccctgctggactccgagcccctgcggggcgccggccacttcgccgcctccgtcggcatccggcgggtctccaacgactccgccgcccccctggtccccgccgtcccccggcccgaggtcgacaacctgaccctgcggtatcggtccctggtctatcagctgaacttcgaccagatgctgcggaacgtcgacaaggacggcacctggtcccccggcgagctggtcctggtcgtccaggtccacaaccggcccgagtatctgcggctgctgatcgactccctgcggaaggcccagggcatccgggaggtcctggtcatcttctcccacgacttctggtccgccgagatcaactccctgatctcctccgtcgacttctgccccgtcctgcaggtcttcttccccttctccatccagctgtatccctccgagttccccggctccgacccccgggactgcccccgggacctgaagaagaacgccgccctgaagctgggctgcatcaacgccgagtatcccgactccttcggccactatcgggaggccaagttctcccagaccaagcaccactggtggtggaagctgcacttcgtctgggagcgggtcaaggtcctgcaggactataccggcctgatcctgttcctggaggaggaccactatctggcccccgacttctatcacgtcttcaagaagatgtggaagctgaagcagcaggagtgccccggctgcgacgtcctgtccctgggcacctataccaccatccggtccttctatggcatcgccgacaaggtcgacgtcaagacctggaagtccaccgagcacaacatgggcctggccctgacccgggacgcctatcagaagctgatcgagtgcaccgacaccttctgcacctatgacgactataactgggactggaccctgcagtatctgaccctggcctgcctgcccaaggtctggaaggtcctggtcccccaggccccccggatcttccacgccggcgactgcggcatgcaccacaagaagacctgccggccctccacccagtccgcccagatcgagtccctgctgaacaacaacaagcagtatctgttccccgagaccctggtcatcggcgagaagttccccatggccgccatctcccccccccggaagaacggcggctggggcgacatccgggaccacgagctgtgcaagtcctatcggcggctgcaggcgggagcgtatccttatgacgtccctgattacgcatatccttatgacgtccctgattacgcatatccttatgacgtccctgattacgcataaggtaccatttaaatatcccaatggcgcgccgagcttggctcgagcatggtcatagctgtttcctgtgtgaaattgttatccgctcacaattccacacaacatacgagccggaagcataaagtgtaaagcctggggtgcctaatgagtgagctaactcacattaattgcgttgcgctcactgcccgctttccagtcgggaaacctgtcgtgccagctgcattaatgaatcggccaacgcgcggggagaggcggtttgcgtattgggcgctcttccgcttcctcgctcactgactcgctgcgctcggtcgttcggctgcggcgagcggtatcagctcactcaaaggcggtaatacggttatccacagaatcaggggataacgcaggaaagaacatgtgagcaaaaggccagcaaaaggccaggaaccgtaaaaaggccgcgttgctggcgtttttccataggctccgcccccctgacgagcatcacaaaaatcgacgctcaagtcagaggtggcgaaacccgacaggactataaagataccaggcgtttccccctggaagctccctcgtgcgctctcctgttccgaccctgccgcttaccggatacctgtccgcctttctcccttcgggaagcgtggcgctttctcatagctcacgctgtaggtatctcagttcggtgtaggtcgttcgctccaagctgggctgtgtgcacgaaccccccgttcagcccgaccgctgcgccttatccggtaactatcgtcttgagtccaacccggtaagacacgacttatcgccactggcagcagccactggtaacaggattagcagagcgaggtatgtaggcggtgctacagagttcttgaagtggtggcctaactacggctacactagaagaacagtatttggtatctgcgctctgctgaagccagttaccttcggaaaaagagttggtagctcttgatccggcaaacaaaccaccgctggtagcggtggtttttttgtttgcaagcagcagattacgcgcagaaaaaaaggatctcaagaagatcctttgatcttttctacggggtctgacgctcagtggaacgaaaactcacgttaagggattttggtcatgagattatcaaaaaggatcttcacctagatccttttaaattaaaaatgaagttttaaatcaatctaaagtatatatgagtaaacttggtctgacagttagaaaaactcatcgagcatcaaatgaaactgcaatttattcatatcaggattatcaataccatatttttgaaaaagccgtttctgtaatgaaggagaaaactcaccgaggcagttccataggatggcaagatcctggtatcggtctgcgattccgactcgtccaacatcaatacaacctattaatttcccctcgtcaaaaataaggttatcaagtgagaaatcaccatgagtgacgactgaatccggtgagaatggcaaaagtttatgcatttctttccagacttgttcaacaggccagccattacgctcgtcatcaaaatcactcgcatcaaccaaaccgttattcattcgtgattgcgcctgagcgagacgaaatacgcgatcgctgttaaaaggacaattacaaacaggaatcgaatgcaaccggcgcaggaacactgccagcgcatcaacaatattttcacctgaatcaggatattcttctaatacctggaatgctgttttcccagggatcgcagtggtgagtaaccatgcatcatcaggagtacggataaaatgcttgatggtcggaagaggcataaattccgtcagccagtttagtctgaccatctcatctgtaacatcattggcaacgctacctttgccatgtttcagaaacaactctggcgcatcgggcttcccatacaatcgatagattgtcgcacctgattgcccgacattatcgcgagcccatttatacccatataaatcagcatccatgttggaatttaatcgcggcctagagcaagacgtttcccgttgaatatggctcatactcttcctttttcaatattattgaagcatttatcagggttattgtctcatgagcggatacatatttgaatgtatttagaaaaataaacaaataggggttccgcgcacatttccccgaaaagtgccacctgacgtctaagaaaccattattatcatgacattaacctataaaaataggcgtatcacgaggccctttcgtc

SEQ ID NO: 29 - DNA, 4219 bp, Artificial Sequence
  pLMTB6952
tcgcgcgtttcggtgatgacggtgaaaacctctgacacatgcagctcccggagacggtcacagcttgtctgtaagcggatgccgggagcagacaagcccgtcagggcgcgtcagcgggtgttggcgggtgtcggggctggcttaactatgcggcatcagagcagattgtactgagagtgcaccatatgcggtgtgaaataccgcacagatgcgtaaggagaaaataccgcatcaggcgccattcgccattcaggctgcgcaactgttgggaagggcgatcggtgcgggcctcttcgctattacgccagctggcgaaagggggatgtgctgcaaggcgattaagttgggtaacgccagggttttcccagtcacgacgttgtaaaacgacggccagtgaattgacgcgtattgggatatttaaatggtaccaacacttgatcatcaatgcgcaatgtgcgcgtgttgtgtgtgtgtgtgcgagcgcacacacacatgcacacgactcacgttgtcacacaattgagagctctctcttctccttcccctctctctcctctctcctctctccagagctctctcttctccttcccctctctctcctctctcctctctccagagctcgagccaccatgcgcttgaacgtaaagaaggcactcattttcgtcggctgcgttgtctttctgtgggtgctcctctcctacgcgagcgtcattgaagtgccgcgcgctgtgccacagaaggatcccgcagtagaaattgagaagaagatcataaagctgcagaagcaggtggatgcccagatggccgagtctaagagtctgcttgcgaaggtcaagaagcttaagaagatatcggagggagagaacgtgggtggcgaggaggactccctgaaagacagcgaagtgatgcagcacctgtcccagccgattctccctgtccttgtgatcgcgtgcgaccgtgtgacggtgcagcgatgcctggacaatctcgtgaagtttcgcccatccaaggagacctttccgatcattgtgtcgcaggactgcggccacaacgctacatacgaggtgataactagctacacggcttcagatccgacgatctcggtggtacgacaaccggacttgtccgagatcgtgctgccgcgggtgaaggtgaagttccgagggtactataagatcgcccgccactacaaatttgccttgaaccacgtttttgagacactgggtcacgaggctgtgatcatcgtagaggacgacctcgatatcagcccggacttcttcgaatactttttgggcacgtaccctttgcttctcaaggacccgagcctttggtgtatctctgcctggaacgacaatggtaagatggaggtgatcgatatgagccggccagatctgctccaccggacagatttcttccccggtcttgggtgggttttgcgccgggagatgtggcggaagcttgcacccaagtggcctacagctttttttgacgactggcttcggaacccagtgaacatcgacggcaaggcatgtattcgcccagagattagccgcacgtactcattcggaaaagtgggagtctcgaaagggctcttttttgaccttcatctccggaacattcagctcaatatggaatatgtggagtttacgaagcttaacctgacctacctcctgaaggagcactacgacgacgctctcgtgagtacggtgtacaatctgcccgagatgtcagcctcggaagttgtggcggggagtgatctcagcgcagaccccgtgcgagtcatgtactcgaacgcaaagacataccagcgtgccgcgaagaagctcggtctgatggacgactttcgatcaggtgttccccgcacggcgtaccgtgggatagtaacatgcttcattcgcggccgccgggtgtaccttgcccccagtttcgagtggaacaagtacgacccgacttggggcgcgggtgcctggtcgcatccccaatttgagaagtagggtaccatttaaatatcccaatggcgcgccgagcttggctcgagcatggtcatagctgtttcctgtgtgaaattgttatccgctcacaattccacacaacatacgagccggaagcataaagtgtaaagcctggggtgcctaatgagtgagctaactcacattaattgcgttgcgctcactgcccgctttccagtcgggaaacctgtcgtgccagctgcattaatgaatcggccaacgcgcggggagaggcggtttgcgtattgggcgctcttccgcttcctcgctcactgactcgctgcgctcggtcgttcggctgcggcgagcggtatcagctcactcaaaggcggtaatacggttatccacagaatcaggggataacgcaggaaagaacatgtgagcaaaaggccagcaaaaggccaggaaccgtaaaaaggccgcgttgctggcgtttttccataggctccgcccccctgacgagcatcacaaaaatcgacgctcaagtcagaggtggcgaaacccgacaggactataaagataccaggcgtttccccctggaagctccctcgtgcgctctcctgttccgaccctgccgcttaccggatacctgtccgcctttctcccttcgggaagcgtggcgctttctcatagctcacgctgtaggtatctcagttcggtgtaggtcgttcgctccaagctgggctgtgtgcacgaaccccccgttcagcccgaccgctgcgccttatccggtaactatcgtcttgagtccaacccggtaagacacgacttatcgccactggcagcagccactggtaacaggattagcagagcgaggtatgtaggcggtgctacagagttcttgaagtggtggcctaactacggctacactagaagaacagtatttggtatctgcgctctgctgaagccagttaccttcggaaaaagagttggtagctcttgatccggcaaacaaaccaccgctggtagcggtggtttttttgtttgcaagcagcagattacgcgcagaaaaaaaggatctcaagaagatcctttgatcttttctacggggtctgacgctcagtggaacgaaaactcacgttaagggattttggtcatgagattatcaaaaaggatcttcacctagatccttttaaattaaaaatgaagttttaaatcaatctaaagtatatatgagtaaacttggtctgacagttagaaaaactcatcgagcatcaaatgaaactgcaatttattcatatcaggattatcaataccatatttttgaaaaagccgtttctgtaatgaaggagaaaactcaccgaggcagttccataggatggcaagatcctggtatcggtctgcgattccgactcgtccaacatcaatacaacctattaatttcccctcgtcaaaaataaggttatcaagtgagaaatcaccatgagtgacgactgaatccggtgagaatggcaaaagtttatgcatttctttccagacttgttcaacaggccagccattacgctcgtcatcaaaatcactcgcatcaaccaaaccgttattcattcgtgattgcgcctgagcgagacgaaatacgcgatcgctgttaaaaggacaattacaaacaggaatcgaatgcaaccggcgcaggaacactgccagcgcatcaacaatattttcacctgaatcaggatattcttctaatacctggaatgctgttttcccagggatcgcagtggtgagtaaccatgcatcatcaggagtacggataaaatgcttgatggtcggaagaggcataaattccgtcagccagtttagtctgaccatctcatctgtaacatcattggcaacgctacctttgccatgtttcagaaacaactctggcgcatcgggcttcccatacaatcgatagattgtcgcacctgattgcccgacattatcgcgagcccatttatacccatataaatcagcatccatgttggaatttaatcgcggcctagagcaagacgtttcccgttgaatatggctcatactcttcctttttcaatattattgaagcatttatcagggttattgtctcatgagcggatacatatttgaatgtatttagaaaaataaacaaataggggttccgcgcacatttccccgaaaagtgccacctgacgtctaagaaaccattattatcatgacattaacctataaaaataggcgtatcacgaggccctttcgtc

SEQ ID NO: 30 - DNA, 3606 bp, Artificial Sequence
  pLMTB6956
tcgcgcgtttcggtgatgacggtgaaaacctctgacacatgcagctcccggagacggtcacagcttgtctgtaagcggatgccgggagcagacaagcccgtcagggcgcgtcagcgggtgttggcgggtgtcggggctggcttaactatgcggcatcagagcagattgtactgagagtgcaccatatgcggtgtgaaataccgcacagatgcgtaaggagaaaataccgcatcaggcgccattcgccattcaggctgcgcaactgttgggaagggcgatcggtgcgggcctcttcgctattacgccagctggcgaaagggggatgtgctgcaaggcgattaagttgggtaacgccagggttttcccagtcacgacgttgtaaaacgacggccagtgaattgacgcgtattgggatatttaaatggtacctcatcggcgagaagttccccatggccgccatctcccccccccggaagaacggcggctggggcgacatccgggaccacgagctgtgcaagtcctatcggcggctgcaggcgggagcgtatccttatgacgtccctgattacgcatatccttatgacgtccctgattacgcatatccttatgacgtccctgattacgcataatcgagggaggaggaggaggcgcgtagcattgcgtgcgggttatgtgtgcgtgcgtgtgtgtgtgcggtgcgcgcctttcctcttttttttctccctctcgtcggttttttttttctgaggagacggggcgaagacgcgagcggggggcggcgtttgtgtgtgtgtgtgcgcgtgtcgggggcagcggtgttggcggaacggccaacgccctgccccctccccgccctgcgacgtttctgcgcacccgttctctccttcctgcgtgcgtgtctgcgcgcatgcacatctgtccgcgtgtgccgcagcgctggtatttttgtgagggcagagccctgcctccccgcctctctgccgttggcaggtgaagcgaaaacgaagcgagagggcagtctgcatgtgtgtgcgagggcatgcggagcccccctccccccgccccctgccgtgctgcaccgctattgtggcgtcttctctcgttgtgcgcaagtgtggctgcaccacggccgcctcatgtgcgtgtgtgcgcatgtacacacacacacacacacacacacacacacgggcaggcgcacgctcctctctcttcagggagcgccgccccgctggtgtcattggacgagcatccgccgcgcatctcttcacccctcacccctcatccctctcccctctccccgcacacacacgcagtccttcgctttcactcttcgaacaaacacctcaaccatcttatcacctttctctcttccttgtcaaccggtaccatttaaatatcccaatggcgcgccgagcttggctcgagcatggtcatagctgtttcctgtgtgaaattgttatccgctcacaattccacacaacatacgagccggaagcataaagtgtaaagcctggggtgcctaatgagtgagctaactcacattaattgcgttgcgctcactgcccgctttccagtcgggaaacctgtcgtgccagctgcattaatgaatcggccaacgcgcggggagaggcggtttgcgtattgggcgctcttccgcttcctcgctcactgactcgctgcgctcggtcgttcggctgcggcgagcggtatcagctcactcaaaggcggtaatacggttatccacagaatcaggggataacgcaggaaagaacatgtgagcaaaaggccagcaaaaggccaggaaccgtaaaaaggccgcgttgctggcgtttttccataggctccgcccccctgacgagcatcacaaaaatcgacgctcaagtcagaggtggcgaaacccgacaggactataaagataccaggcgtttccccctggaagctccctcgtgcgctctcctgttccgaccctgccgcttaccggatacctgtccgcctttctcccttcgggaagcgtggcgctttctcatagctcacgctgtaggtatctcagttcggtgtaggtcgttcgctccaagctgggctgtgtgcacgaaccccccgttcagcccgaccgctgcgccttatccggtaactatcgtcttgagtccaacccggtaagacacgacttatcgccactggcagcagccactggtaacaggattagcagagcgaggtatgtaggcggtgctacagagttcttgaagtggtggcctaactacggctacactagaagaacagtatttggtatctgcgctctgctgaagccagttaccttcggaaaaagagttggtagctcttgatccggcaaacaaaccaccgctggtagcggtggtttttttgtttgcaagcagcagattacgcgcagaaaaaaaggatctcaagaagatcctttgatcttttctacggggtctgacgctcagtggaacgaaaactcacgttaagggattttggtcatgagattatcaaaaaggatcttcacctagatccttttaaattaaaaatgaagttttaaatcaatctaaagtatatatgagtaaacttggtctgacagttagaaaaactcatcgagcatcaaatgaaactgcaatttattcatatcaggattatcaataccatatttttgaaaaagccgtttctgtaatgaaggagaaaactcaccgaggcagttccataggatggcaagatcctggtatcggtctgcgattccgactcgtccaacatcaatacaacctattaatttcccctcgtcaaaaataaggttatcaagtgagaaatcaccatgagtgacgactgaatccggtgagaatggcaaaagtttatgcatttctttccagacttgttcaacaggccagccattacgctcgtcatcaaaatcactcgcatcaaccaaaccgttattcattcgtgattgcgcctgagcgagacgaaatacgcgatcgctgttaaaaggacaattacaaacaggaatcgaatgcaaccggcgcaggaacactgccagcgcatcaacaatattttcacctgaatcaggatattcttctaatacctggaatgctgttttcccagggatcgcagtggtgagtaaccatgcatcatcaggagtacggataaaatgcttgatggtcggaagaggcataaattccgtcagccagtttagtctgaccatctcatctgtaacatcattggcaacgctacctttgccatgtttcagaaacaactctggcgcatcgggcttcccatacaatcgatagattgtcgcacctgattgcccgacattatcgcgagcccatttatacccatataaatcagcatccatgttggaatttaatcgcggcctagagcaagacgtttcccgttgaatatggctcatactcttcctttttcaatattattgaagcatttatcagggttattgtctcatgagcggatacatatttgaatgtatttagaaaaataaacaaataggggttccgcgcacatttccccgaaaagtgccacctgacgtctaagaaaccattattatcatgacattaacctataaaaataggcgtatcacgaggccctttcgtc

SEQ ID NO: 31 - DNA, 3606 bp, Artificial Sequence
  pLMTB6958
tcgcgcgtttcggtgatgacggtgaaaacctctgacacatgcagctcccggagacggtcacagcttgtctgtaagcggatgccgggagcagacaagcccgtcagggcgcgtcagcgggtgttggcgggtgtcggggctggcttaactatgcggcatcagagcagattgtactgagagtgcaccatatgcggtgtgaaataccgcacagatgcgtaaggagaaaataccgcatcaggcgccattcgccattcaggctgcgcaactgttgggaagggcgatcggtgcgggcctcttcgctattacgccagctggcgaaagggggatgtgctgcaaggcgattaagttgggtaacgccagggttttcccagtcacgacgttgtaaaacgacggccagtgaattgacgcgtattgggatatttaaatggtacccaaagacataccagcgtgccgcgaagaagctcggtctgatggacgactttcgatcaggtgttccccgcacggcgtaccgtgggatagtaacatgcttcattcgcggccgccgggtgtaccttgcccccagtttcgagtggaacaagtacgacccgacttggggcgcgggtgcctggtcgcatccccaatttgagaagtagtcgagggaggaggaggaggcgcgtagcattgcgtgcgggttatgtgtgcgtgcgtgtgtgtgtgcggtgcgcgcctttcctcttttttttctccctctcgtcggttttttttttctgaggagacggggcgaagacgcgagcggggggcggcgtttgtgtgtgtgtgtgcgcgtgtcgggggcagcggtgttggcggaacggccaacgccctgccccctccccgccctgcgacgtttctgcgcacccgttctctccttcctgcgtgcgtgtctgcgcgcatgcacatctgtccgcgtgtgccgcagcgctggtatttttgtgagggcagagccctgcctccccgcctctctgccgttggcaggtgaagcgaaaacgaagcgagagggcagtctgcatgtgtgtgcgagggcatgcggagcccccctccccccgccccctgccgtgctgcaccgctattgtggcgtcttctctcgttgtgcgcaagtgtggctgcaccacggccgcctcatgtgcgtgtgtgcgcatgtacacacacacacacacacacacacacacacgggcaggcgcacgctcctctctcttcagggagcgccgccccgctggtgtcattggacgagcatccgccgcgcatctcttcacccctcacccctcatccctctcccctctccccgcacacacacgcagtccttcgctttcactcttcgaacaaacacctcaaccatcttatcacctttctctcttccttgtcaaccggtaccatttaaatatcccaatggcgcgccgagcttggctcgagcatggtcatagctgtttcctgtgtgaaattgttatccgctcacaattccacacaacatacgagccggaagcataaagtgtaaagcctggggtgcctaatgagtgagctaactcacattaattgcgttgcgctcactgcccgctttccagtcgggaaacctgtcgtgccagctgcattaatgaatcggccaacgcgcggggagaggcggtttgcgtattgggcgctcttccgcttcctcgctcactgactcgctgcgctcggtcgttcggctgcggcgagcggtatcagctcactcaaaggcggtaatacggttatccacagaatcaggggataacgcaggaaagaacatgtgagcaaaaggccagcaaaaggccaggaaccgtaaaaaggccgcgttgctggcgtttttccataggctccgcccccctgacgagcatcacaaaaatcgacgctcaagtcagaggtggcgaaacccgacaggactataaagataccaggcgtttccccctggaagctccctcgtgcgctctcctgttccgaccctgccgcttaccggatacctgtccgcctttctcccttcgggaagcgtggcgctttctcatagctcacgctgtaggtatctcagttcggtgtaggtcgttcgctccaagctgggctgtgtgcacgaaccccccgttcagcccgaccgctgcgccttatccggtaactatcgtcttgagtccaacccggtaagacacgacttatcgccactggcagcagccactggtaacaggattagcagagcgaggtatgtaggcggtgctacagagttcttgaagtggtggcctaactacggctacactagaagaacagtatttggtatctgcgctctgctgaagccagttaccttcggaaaaagagttggtagctcttgatccggcaaacaaaccaccgctggtagcggtggtttttttgtttgcaagcagcagattacgcgcagaaaaaaaggatctcaagaagatcctttgatcttttctacggggtctgacgctcagtggaacgaaaactcacgttaagggattttggtcatgagattatcaaaaaggatcttcacctagatccttttaaattaaaaatgaagttttaaatcaatctaaagtatatatgagtaaacttggtctgacagttagaaaaactcatcgagcatcaaatgaaactgcaatttattcatatcaggattatcaataccatatttttgaaaaagccgtttctgtaatgaaggagaaaactcaccgaggcagttccataggatggcaagatcctggtatcggtctgcgattccgactcgtccaacatcaatacaacctattaatttcccctcgtcaaaaataaggttatcaagtgagaaatcaccatgagtgacgactgaatccggtgagaatggcaaaagtttatgcatttctttccagacttgttcaacaggccagccattacgctcgtcatcaaaatcactcgcatcaaccaaaccgttattcattcgtgattgcgcctgagcgagacgaaatacgcgatcgctgttaaaaggacaattacaaacaggaatcgaatgcaaccggcgcaggaacactgccagcgcatcaacaatattttcacctgaatcaggatattcttctaatacctggaatgctgttttcccagggatcgcagtggtgagtaaccatgcatcatcaggagtacggataaaatgcttgatggtcggaagaggcataaattccgtcagccagtttagtctgaccatctcatctgtaacatcattggcaacgctacctttgccatgtttcagaaacaactctggcgcatcgggcttcccatacaatcgatagattgtcgcacctgattgcccgacattatcgcgagcccatttatacccatataaatcagcatccatgttggaatttaatcgcggcctagagcaagacgtttcccgttgaatatggctcatactcttcctttttcaatattattgaagcatttatcagggttattgtctcatgagcggatacatatttgaatgtatttagaaaaataaacaaataggggttccgcgcacatttccccgaaaagtgccacctgacgtctaagaaaccattattatcatgacattaacctataaaaataggcgtatcacgaggccctttcgtc

SEQ ID NO: 32 - DNA, 28846 bp, Artificial Sequence
  pLMTB7233
ctagatttatggctagctcagtcctaggtacaatgctagctactagagattaggaggatcgatagcgcgcaggaggacagctatgaatttacaaaagaaaaaaattatgttaataactaatcatgacgatgatatctattgttttcgaaaagaagttatagagtcactagttgagtatgggtatgaagtgctagtgtcatgtccttatggagataagatagagttgatgaagtctattcaatttgagtatgaagatattactattgatagaagaggaataaaccctttaaaagatattcgtctatttcttagttatataagattattgagaaaatatagaccggatgtagtcttgacatataccgtgaaaccaaatgtatatgctagcctagctgcaacaattttaggaataaaatatataaataacgtaacaggtttaggtagtgtcttaacaatgggttcttgtgtaagaagcctggtgttattactgtttagaatttcttttaggaaatcaaattgtgttttttttcaaaatgaatataatatgaaaatgttaaaaactcttggcttgattttgggtgactctaagctgatacctgggtcaggagtgaacattgaaaagtatcctgtgcaacagtatccaaatggtggaaatggaattcaaggagaaacaatcgtttttaattttattggtaggatattaaaagaaaaaggtatagatacttatctggctgctgcccaaattattaagagtcgatatcccaaaacagagtttaatattattggctttatagaaccgacagagagtaattatgaacttaaaatttgtgacttagaaaaaaaaggaatcgtttattatttgggacaacaaaaagatgtgatacctcatattacccgttcccatgcaattatccatcccagtgtgtatggtgaaggaatgagcaatgtattactagaaaacgctagttcaggacgtgttttaattacgacagataatccaggttgcaaagaaattgttaaagatagagagacaggctatatatttcaagggggaaatgttgaggaactagtctctatattggaagtttttttaggtctagaaaatgaaaaacgaaaagagatgggacttcaagggagaatgtatatagagcaatatttttctcgtcaaattattatagatgcttatttagataaaataaaaggagctttagatgaataggattataaaaaatattgttggtttacttcgtgcaaatatttgcttgatattattaaaagtgtgtcgaaacaaggatcttacttttcattattttttaaaatttggaaagaatgtaactgtcgaacaggaatctaatgctaaattaatcttaggaaaaaagattagagtaaacgccgggggagtattgaaagttagaaaaggagcaaaactcaagatttctgatgatgtatttttgagtaataattgtatgatagcttgtcgtaaatacatagatattaaatctggagtaaaatgtggtcctggagtacttatatatgatcatgactatgatgttagtgttccaggtggattgaaagcaaaaaaatttaagacggccccagttatgattggagaaaatgtttggattggagctaacagcattgtcttgaagggagtgagtattggtgagaatagtgtggttgcagcaggaagtgttgtaacaaaggatattccagctgatactatatttattcagaaacgtttatcaagggagatgaaattatgaaagtatttatagcgactgaatttagatgtacaatctataaaaatgaaatatatttaaaaccgaaagcttattttatttatgagcgctatgctaaagcatttggagagattgtactatgtagtcgttatgagaaggtggaatcataccctgaaggatatcataaagcgaactttattaataaatttatccctatagaaggtctacatcaggttctatttggtcaaaataaaaataagattattgaaggaatgattgatagcgacttaatagttgttcgtattccgtctataattggatcaaaaactgcagactacgcattgaagataggtaagccgtatctgacagaaataatgggggatgcttgggattcttactggtatcatagtttaaagggaaaattattagctccatatatatacgccaaaactaaatcaattgtaaaaaacgctaattattgcatatacgtgacagaaaaatatttacaagatagatatcctaatattaaatctaatatcgttgcttcaaatgttaatattacctctgtagagaatagatctttgaagagccgtctttataagttgaaaaaatttaatcctcaaaaaatttcaataatgacaacagcatctgtgaatgtacgagccaagggccatagatttgtattggaagcaatgaagagattagaaatacaaggtattttgttggattattatttagcaggtgatggtgatcaaagtttcttaaaaaagaaagcagaggaattgggagtagcgaatagaatccattttttaggggaattgactacatcacaaatttatgagtatttggataaagttgatttatatatacaaccaagtttacaagaagggttacctcgtgcggtaattgaagctatgagccgtgcttgcccttgtatagggtctaataaagcaggaattccagagttgctggggccacattgtctatttactccatcctcttcacaagcgattgcgggatctattatagattttattagtatggataaggaaaagatggtgataaaacagtttgaattctcaaaaaaatttctttcgagtgtattaaataaacgcagaagtgactattttgctcaaattagaagagaattaaataattctgatggtttagattaaaatgcgatggaaaatccgtttcgatatattaaatatgctataaaaactgactacatagccaatcaaatttttgaatacgcattacgtttaaattattagttaaaggaaaaaagtaaatgaagtttagtctacaatcaaatgatataaaaaataaaataatacttctagtaggtgtagttttttcagggactttaattttatgcagtgaaaataatgatgttacaattccattattttcaatgatttttttaagttttatggcaatgataattgtgaaatttaatatttttcatccctatgtgtggtatagtagcttctttactatttattctatttcttacccgctactctatagaatggagtatataaactatggttatacaaaagatttgattttcatgcaatggctggctttggcaactttgttgttaactctaccttctaaagccattgtgttaagcgaaaggaaaataaacctaaataacaataactatttattatttctcaataatatgaatacgtttatcacaacagtagcaattatatatctattaggaagtggttttagaaataaaggggaaatatattcaggtgccaatattgtgataatgttagtattttctttggtttattttatgattctcattcatacatatcagctatttatacagttgagtactaaaaaatggagactactaaattgtaatactaacacagcgatagttatctgtctcttctctatcgttacaggggaaagagattatatgtttactttattcatccttgatgtgattatattattttactttcacaaaataaaacgtttttatcttgtaatgttagttccgcttgcggcactactgattccgttatctgcagtttttaaatatactttattaagtgggcaagtttcatctataaatacaaataatatttggtttgatttgctagatggtgagtttgtatcagctagtcgtaatttacagattctgatattacataatatgggcaattatttcgaaggtcgttctttttttaatgacatagtaagaattttttataatacggggtattctaatcaaacttggtttatggacaccttttttccaaacgtacattcaaccaaatatggttttactcttgtgggagagggatatgtgaatggaggatactttggaattgtaatgatttttatgctaacaggctttttgatgagatttctttatataaacgctcaaagaaatatatacgggatgctgatatatctgtatatgatacctatttttatttattctactcgtgctgattttgctaacatattatctccattacttaaatatgctatattgggaacattggttattgtttttatcaatagaatggtgttgatatcaccattggatgaaatgggtggtgagtagtttatttaaaaaggtggggtatactttttgatactatagtggtttgaagttggagtagtacaatgcagcttctaaagaatttttataaattactttaaattccctaatcgttttgttcatattctatttcaatatactataattttaaatttactgttataaaatttaacatacggagaaaataagtgagactatctaagaaatattggtttgctttaacgagtaaatttttgttaatcttattaacacttttatcctcaattataattaataggggattaggtgttgaaaaaaaaggagattatgcctatgtaatgaacttagtagaaattttttatattttaggtggagttggtttaggtcaggcttactcgacctttaaaaggaatcattctaatgagtatcagaataaatttgtttttttaacttttattcaaggattattgtttggaataataggtttaataatagttttagctgatgttccgatagattatggtggggtaataatagttttgtccagtctatctattatgagaacaaatcttactatgattgcagtaatagaaaatagtataaagaggaataagattgtattaggagtaagcgtagtatattccgttatgctagtattgttgttactatttcatttagtttctatagagatggtatttttggtatatgctattaatgaatttttacgtatcattttatttttatactattacaatatgttcccagtttttgaacatattagtattaaagaatttttcactatatataagtttggatttctttctatgattcttactctattaattacatttaattatagtattgatatcataatgttgaagcaaatgtctagtagttataatgtaggtatatacagtgtcgcagttacgttttctaatatgtttttgatggttccagactcatttaaagagattttatttggtgattcggctaaaagaacttttgagaaaaataaagcaataaatgcaataaaagtatcatttctatttatgattttattaattattggatttctttcttttggagaatttgcgattacgctcctttatggttccagttatataaaggcatttcctataacattagtcatttttttaggaagcttatcgatgattttctttaaaattttacaaccaatttatatatctcagggtaaacagagtgtagctataaaaattttatctgtgtcggctttgataaatataagtttaaactggtacttaattcctaactaccaaattacaggagctgcgatagcatcagcaatctcttatactgtatgtggtttgttttttattatagattatcttagaaattgattataatagttgttaaagaatgtgtattagtggatgaaaatataaaaataacaagaggtattatgatatgagaggaaaaacaattctaattacaggagtagctggttttattggatcaaatctggttaggaaattattggaattagaaggaacgatgacaatcattggtttggacaatttgaatgattactatgatattgcacttaaagattatcgattgcttcaacttaataagctaattcaggattatccagaaaaaaactggatatttatcaagggtgatattgcagataaaatgcttattaataagatttttaagagttatcatcctcagattgttgttaatctagctgcccaggcaggagtacgctactccattacaaatccagatgtatatatagaaagtaatatcgttggctttcataatgtgttggaagcttgtcgtcattcgtatgagatatatgatggtggtgtggaacacttagtttatgcatcgtcctcatcggtatatggtggaaataaaaaaatcccgtttgcaacagaagataaggtagacaatcctatttcactatatgctgcgactaaaaaaacaaatgaacttcaagcgtatgcttattcaaagatttacaatattccttcgacaggcttacgcttttttacagtttatggtcctgctgggcgcccagatatggcctattttggatttacagataaattgcgaagtggttccgatattgagatttataatcatggtaattgtaaacgagattttacttatatagatgatatcgttgaggggatagtaagggtcatgcaatcagctccgaagaaactagtgggatctgataatttaccgttagccccatataaagtgtacaatattgggaatagtaaacccgaaaatttgttagattttgtggatgttcttcaacaggagctaatcaaggcaggagttttgccggaaaattatgattttgatagtcataaaaaattagttcctatgcaaccaggcgatgttcctgttacttatgcagatacaagtgatttagagagagattttggttttaaaccaaaaacttctttacgagaaggtttgagaaagtttgcagagtggtataaagactactataatgtataacgagagtgttttgagaaaggaaaaaattatgaaaatagcagtagcaggtacaggatatgttggattatctattgcaatcttactggctcaacatcatcaagttgttgccgtagatatcattcctgagaaagttgagttaatcaataaaaagaagtcccctatccaagacgattatatagaaaaatatctcgcggaaaaagaattgaatctcgtagctacattgaatgcagaggaagcatatgagaatgcggattttatagttattgcggctccaactaattatgatccgaaaaaaaattttttcgatacatcttcagtcgaggctgtcattgaagcagttatgaaatataatcctgatgcaattataataattaaaagtactgttcctgttggatatacaaagtcagtacggaggaaatttcttacagacaatattatgtttagtcctgagtttttacgggagtcaaaagcgttatatgataacctatatccgagtcgaattattataggtacagataaagatgataaagatttggtaaagtctgctgaaatttttgtaaaaatgcttcaggaaggtgcagtgaaagaaaatattgaaacattgtatatggattttacagaagctgaagcagtaaaactttttgctaatacctatcttgccctccgggtttcctattttaacgagttagatacttattctgagatgaaaggactagatactcaagcgattattgatggagtttgtttagatccgagaataggttctcactacaataatccttcttttggttatgggggttactgtcttcctaaagataccaagcaacttcttgcaaattattctgacgttccacaagaaatgataacagctatagtacaaagtaatcggacaagaaaagattatattgcagatcgtattttagatcttgctggatcttatgtaggcaatgatttctataaaccagataaagaaaaagagattgttgtaggaatttatcgtttaacaatgaaaagtaattcagataattttagacaatcttctattcaaggtattatgaagcgtttgaaagcaaaaggtgttactattattatttacgaaccaactcttgaaagtggtactactttctatggtagtcaagtagttaatgattttgaaatatttaagaaatctagtcaagtgattgttgcaaatcgttttgatgagactttagaagatgtgaggggtaaagtttatactagggatatttttaagagagattaatcgagggccggcccccggggggtccccctgcaggttaattaaggatctgttttggcggatgagagaagaaattcgtcgcccgccataaactgccaggcatcaaattaagcagaaggccatcctgacggatggcctttttgcgtttctacaaactcttcctgtggatccgagctccttaagctgatagctagctcagtcctagggattatgctagctactagagattaggaggactagtcctgaggtacgtaggcgcgccgtgcactgttttggcggatgagagaagaaattcgtcgcccgccataaactgccaggcatcaaattaagcagaaggccatcctgacggatggcctttttgcgtttctacaaactcttcctgttgcacacatgtgaattcacccccgaacacgagcacggcacccgcgaccactatgccaagaatgcccaaggtaaaaattgccggccccgccatgaagtccgtgaatgccccgacggccgaagtgaagggcaggccgccacccaggccgccgccctcactgcccggcacctggtcgctgaatgtcgatgccagcacctgcggcacgtcaatgcttccgggcgtcgcgctcgggctgatcgcccatcccgttactgccccgatcccggcaatggcaaggactgccagcgctgccatttttggggtgaggccgttcgcggccgaggggcgcagcccctggggggatgggaggcccgcgttagcgggccgggagggttcgagaagggggggcaccccccttcggcgtgcgcggtcacgcgcacagggcgcagccctggttaaaaacaaggtttataaatattggtttaaaagcaggttaaaagacaggttagcggtggccgaaaaacgggcggaaacccttgcaaatgctggattttctgcctgtggacagcccctcaaatgtcaataggtgcgcccctcatctgtcagcactctgcccctcaagtgtcaaggatcgcgcccctcatctgtcagtagtcgcgcccctcaagtgtcaataccgcagggcacttatccccaggcttgtccacatcatctgtgggaaactcgcgtaaaatcaggcgttttcgccgatttgcgaggctggccagctccacgtcgccggccgaaatcgagcctgcccctcatctgtcaacgccgcgccgggtgagtcggcccctcaagtgtcaacgtccgcccctcatctgtcagtgagggccaagttttccgcgaggtatccacaacgccggcggccgcggtgtctcgcacacggcttcgacggcgtttctggcgcgtttgcagggccatagacggccgccagcccagcggcgagggcaaccagcccggtgagcgtcggaaaggcgctggaagccccgtagcgacgcggagaggggcgagacaagccaagggcgcaggctcgatgcgcagcacgacatagccggttctcgcaaggacgagaatttccctgcggtgcccctcaagtgtcaatgaaagtttccaacgcgagccattcgcgagagccttgagtccacgctagatctgcctcgctggcctgccgcagttcttcaacctcccggcgcagcttttcgttctcaatttcagcatccctttcggcataccattttatgacggcggcagagtcataaagcacctcattacccttgccaccgcctcgcagaacgggcattccctgttcctgccagttctgaatggtacggatactcgcaccgaaaatgtcagccagctgctttttgttgacttccattgttcattccacggacaaaaacagagaaaggaaacgacagaggccaaaaagctcgctttcagcacctgtcgtttcctttcttttcagagggtattttaaataaaaacattaagttatgacgaagaagaacggaaacgccttaaaccggaaaattttcataaatagcgaaaacccgcgaggtcgccgccccgtaacaaggcggatcgccggaaaggacccgcaaatgataataattatcaattgcatactatcgacggcactgctgccagataacaccaccggggaaacattccatcatgatggccgtgcggacataggaagccagttcatccatcgctttcttgtctgctgccatttgctttgtgacatccagcgccgcacattcagcagcgtttttcagcgcgttttcgatcaacgtttcaatgttggtatcaacaccaggtttaactttgaacttatcggcactgacggttaccttgttctgcgctggctcatcacgctggataccaaggctgatgttgtagatattggtcaccggctgaggtgtttcgattgccgctgcgtggatagcaccatttgcgatagcggcgtccttgatgaatgacactccattgcgaataagttcgaaggagacggtgtcacgaatgcgctggtccagctcgtcgattgccttttgtgcagcagaggtatcaatctcaacgccaagcgtcatcgaagcgcaatattgctgctcaccaaaacgcgtattgaccaggtgttcaacggcaaatttctgcccttctgatgtcagaaaggtaaagtgattttctttctggtattcagttgctgtgtgtctggtttcagcaaaaccaagctcgcgcaattcggctgtgccagatttagaaggcagatcaccagacagcaacgcgccacggaaaaacagcgcatacagaacatccgtcgccgcgccggacaacgtgataattttatgacccatgatttatttccttttagacgtgagcctgtcgcacagcaaagccgccgaaagttaacggtttgcccaggctcacaactgaaagactttctacggtgtgcgcgtgcgatgcgcgtagaagactgatttatcaacctgtctttatatcaggattcattacctgactatttgtgggtaaagttcgtagtgcgctgatcgtgcaaaatgattttagttgggaacagttcgcaactctgtcccataaaaatcagcatattcccatctatcccatatccagcgcattgaccatcgggatactgaagggagattccatcatctcttagaaagatcaccatctcttttgtttcaatttgcatatagctacctggaggatttatgaatacaaggattttcatggactattaccatgagattgattttccatctttattcgcgagagcagtggaaagcgatgacgatgtgggtactacattgcgcattcacctactttgtgagcgcatggtcgaagcatggatatgcgcatgctgtgactgccaagatctatctcatctgcgcaaggcagaacgtgaagacggccgccctggacctcgcccgcgagcgccaggcgcacgaggccggcgcgcggacccgcgccacggcccacgagcggacgccgcagcaggagcgccagaaggccgccagagaggccgagcgcggccgtgaggcttggacgctagggcagggcatgaaaaagcccgtagcgggctgctacgggcgtctgacgcggtggaaagggggaggggatgttgtctacatggctctgctgtagtgagtgggttgcgctccggcagcggtcctgatcaatcgtcaccctttctcggtccttcaacgttcctgacaacgagcctccttttcgccaatccatcgacaatcaccgcgagtccctgctcgaacgctgcgtccggaccggcttcgtcgaaggcgtctatcgcggcccgcaacagcggcgagagcggagcctgttcaacggtgccgccgcgctcgccggcatcgctgtcgccggcctgctcctcaagcacggccccaacagtgaagtagctgattgtcatcagcgcattgacggcgtccccggccgaaaaacccgcctcgcagaggaagcgaagctgcgcgtcggccgtttccatctgcggtgcgcccggtcgcgtgccggcatggatgcgcgcgccatcgcggtaggcgagcagcgcctgcctgaagctgcgggcattcccgatcagaaatgagcgccagtcgtcgtcggctctcggcaccgaatgcgtatgattctccgccagcatggcttcggccagtgcgtcgagcagcgcccgcttgttcctgaagtgccagtaaagcgccggctgctgaacccccaaccgttccgccagtttgcgtgtcgtcagaccgtctacgccgacctcgttcaacaggtccagggcggcacggatcactgtattcggctgcaactttgtcatgcttgacactttatcactgataaacataatatgtccaccaacttatcagtgataaagaatccgcgcgttcaatcggaccagcggaggctggtccggaggccagacgtgaaacccaacatacccctgatcgtaattctgagcactgtcgcgctcgacgctgtcggcatcggcctgattatgccggtgctgccgggcctcctgcgcgatctggttcactcgaacgacgtcaccgcccactatggcattctgctggcgctgtatgcgttggtgcaatttgcctgcgcacctgtgctgggcgcgctgtcggatcgtttcgggcggcggccaatcttgctcgtctcgctggccggcgccactgtcgactacgccatcatggcgacagcgcctttcctttgggttctctatatcgggcggatcgtggccggcatcaccggggcgactggggcggtagccggcgcttatattgccgatatcactgatggcgatgagcgcgcgcggcacttcggcttcatgagcgcctgtttcgggttcgggatggtcgcgggacctgtgctcggtgggctgatgggcggtttctccccccacgctccgttcttcgccgcggcagccttgaacggcctcaatttcctgacgggctgtttccttttgccggagtcgcacaaaggcgaacgccggccgttacgccgggaggctctcaacccgctcgcttcgttccggtgggctcggggcatgaccgtcgtcgccgccctgatggcggtcttcttcatcatgcaacttgtcggacaggtgccggccgcgctttgggtcattttcggcgaggatcgctttcactgggacgcgaccacgatcggcatttcgcttgccgcatttggcattctgcattcactcgcccaggcaatgatcaccggccctgtagccgcccggctcggcgaaaggcgggcactcatgctcggaatgattgccgacggcacaggctacatcctgcttgccttcgcgacacggggatggatggcgttcccgatcatggtcctgcttgcttcgggtggcatcggaatgccggcgctgcaagcaatgttgtccaggcaggtggatgaggaacgtcaggggcagctgcaaggctcactggcggcgctcaccagcctgacctcgatcgtcggacccctcctcttcacggcgatctatgcggcttctataacaacgtggaacgggtgggcatggattgcaggcgctgccctctacttgctctgcctgccggcgctgcgtcgcgggctttggagcggcgcagggcaacgagccgatcgctgatcgtggaaacgataggcctatgccatgcgggtcaaggcgacttccggcaagctatacgcgccctaggagtgcggttggaacgttggcccagccagatactcccgatcacgagcaggacgccgatgatttgaagcgcactcagcgtctgatccaagaacaaccatcctagcaacacggcggtccccggactgagaaagcccagtaaggaaacaactgtaggttcgagtcgcgagatcccccggaaccaaaggaagtaggttaaacccgctccgatcaggccgagccacgccaggccgagaacattggttcctgtaggcatcgggattggcggatcaaacactaaagctactggaacgagcagaagtcctccggccgccagttgccaggcggtaaaggtgagcagaggcacgggaggttgccacttgcgggtcagcacggttccgaacgccatggaaaccgcccccgccaggcccgctgcgacgccgacaggatctagcgctgcgtttggtgtcaacaccaacagcgccacgcccgcagttccgcaaatagcccccaggaccgccatcaatcgtatcgggctacctagcagagcggcagagatgaacacgaccatcagcggctgcacagcgcctaccgtcgccgcgaccccgcccggcaggcggtagaccgaaataaacaacaagctccagaatagcgaaatattaagtgcgccgaggatgaagatgcgcatccaccagattcccgttggaatctgtcggacgatcatcacgagcaataaacccgccggcaacgcccgcagcagcataccggcgacccctcggcctcgctgttcgggctccacgaaaacgccggacagatgcgccttgtgagcgtccttggggccgtcctcctgtttgaagaccgacagcccaatgatctcgccgtcgatgtaggcgccgaatgccacggcatctcgcaaccgttcagcgaacgcctccatgggctttttctcctcgtgctcgtaaacggacccgaacatctctggagctttcttcagggccgacaatcggatctcgcggaaatcctgcacgtcggccgctccaagccgtcgaatctgagccttaatcacaattgtcaattttaatcctctgtttatcggcagttcgtagagcgcgccgtgcgtcccgagcgatactgagcgaagcaagtgcgtcgagcagtgcccgcttgttcctgaaatgccagtaaagcgctggctgctgaacccccagccggaactgaccccacaaggccctagcgtttgcaatgcaccaggtcatcattgacccaggcgtgttccaccaggccgctgcctcgcaactcttcgcaggcttcgccgacctgctcgcgccacttcttcacgcgggtggaatccgatccgcacatgaggcggaaggtttccagcttgagcgggtacggctcccggtgcgagctgaaatagtcgaacatccgtcgggccgtcggcgacagcttgcggtacttctcccatatgaatttcgtgtagtggtcgccagcaaacagcacgacgatttcctcgtcgatcaggacctggcaacgggacgttttcttgccacggtccaggacgcggaagcggtgcagcagcgacaccgattccaggtgcccaacgcggtcggacgtgaagcccatcgccgtcgcctgtaggcgcgacaggcattcctcggccttcgtgtaataccggccattgatcgaccagcccaggtcctggcaaagctcgtagaacgtgaaggtgatcggctcgccgataggggtgcgcttcgcgtactccaacacctgctgccacaccagttcgtcatcgtcggcccgcagctcgacgccggtgtaggtgatcttcacgtccttgttgacgtggaaaatgaccttgttttgcagcgcctcgcgcgggattttcttgttgcgcgtggtgaacagggcagagcgggccgtgtcgtttggcatcgctcgcatcgtgtccggccacggcgcaatatcgaacaaggaaagctgcatttccttgatctgctgcttcgtgtgtttcagcaacgcggcctgcttggcctcgctgacctgttttgccaggtcctcgccggcggtttttcgcttcttggtcgtcatagttcctcgcgtgtcgatggtcatcgacttcgccaaacctgccgcctcctgttcgagacgacgcgaacgctccacggcggccgatggcgcgggcagggcagggggagccagttgcacgctgtcgcgctcgatcttggccgtagcttgctggaccatcgagccgacggactggaaggtttcgcggggcgcacgcatgacggtgcggcttgcgatggtttcggcatcctcggcggaaaaccccgcgtcgatcagttcttgcctgtatgccttccggtcaaacgtccgattcattcaccctccttgcgggattgccccgactcacgccggggcaatgtgcccttattcctgatttgacccgcctggtgccttggtgtccagataatccaccttatcggcaatgaagtcggtcccgtagaccgtctggccgtccttctcgtacttggtattccgaatcttgccctgcacgaataccagcgaccccttgcccaaatacttgccgtgggcctcggcctgagagccaaaacacttgatgcggaagaagtcggtgcgctcctgcttgtcgccggcatcgttgcgccactcttcattaaccgctatatcgaaaattgcttgcggcttgttagaattgccatgacgtacctcggtgtcacgggtaagattaccgataaactggaactgattatggctcatatcgaaagtctccttgagaaaggagactctagtttagctaaacattggttccgctgtcaagaactttagcggctaaaattttgcgggccgcgaccaaaggtgcgaggggcggcttccgctgtgtacaaccagatatttttcaccaacatccttcgtctgctcgatgagcggggcatgacgaaacatgagctgtcggagagggcaggggtttcaatttcgtttttatcagacttaaccaacggtaaggccaacccctcgttgaaggtgatggaggccattgccgacgccctggaaactcccctacctcttctcctggagtccaccgaccttgaccgcgaggcactcgcggagattgcgggtcatcctttcaagagcagcgtgccgcccggatacgaacgcatcagtgtggttttgccgtcacataaggcgtttatcgtaaagaaatggggcgacgacacccgaaaaaagctgcgtggaaggctctgacgccaagggttagggcttgcacttccttctttagccgctaaaacggccccttctctgcgggccgtcggctcgcgcatcatatcgacatcctcaacggaagccgtgccgcgaatggcatcgggcgggtgcgctttgacagttgttttctatcagaacccctacgtcgtgcggttcgattagctgtttgtcttgcaggctaaacactttcggtatatcgtttgcctgtgcgataatgttgctaatgatttgttgcgtaggggttactgaaaagtgagcgggaaagaagagtttcagaccatcaaggagcgggccaagcgcaagctggaacgcgacatgggtgcggacctgttggccgcgctcaacgacccgaaaaccgttgaagtcatgctcaacgcggacggcaaggtgtggcacgaacgccttggcgagccgatgcggtacatctgcgacatgcggcccagccagtcgcaggcgattatagaaacggtggccggattccacggcaaagaggtcacgcggcattcgcccatcctggaaggcgagttccccttggatggcagccgctttgccggccaattgccgccggtcgtggccgcgccaacctttgcgatccgcaagcgcgcggtcgccatcttcacgctggaacagtacgtcgaggcgggcatcatgacccgcgagcaatacgaggtcattaaaagcgccgtcgcggcgcatcgaaacatcctcgtcattggcggtactggctcgggcaagaccacgctcgtcaacgcgatcatcaatgaaatggtcgccttcaacccgtctgagcgcgtcgtcatcatcgaggacaccggcgaaatccagtgcgccgcagagaacgccgtccaataccacaccagcatcgacgtctcgatgacgctgctgctcaagacaacgctgcgtatgcgccccgaccgcatcctggtcggtgaggtacgtggccccgaagcccttgatctgttgatggcctggaacaccgggcatgaaggaggtgccgccaccctgcacgcaaacaaccccaaagcgggcctgagccggctcgccatgcttatcagcatgcacccggattcaccgaaacccattgagccgctgattggcgaggcggttcatgtggtcgtccatatcgccaggacccctagcggccgtcgagtgcaagaaattctcgaagttcttggttacgagaacggccagtacatcaccaaaaccctgtaaggagtatttccaatgacaacggctgttccgttccgtctgaccatgaatcgcggcattttgttctaccttgccgtgttcttcgttctcgctctcgcgttatccgcgcatccggcgatggcctcggaaggcaccggcggcagcttgccatatgagagctggctgacgaacctgcgcaactccgtaaccggcccggtggccttcgcgctgtccatcatcggcatcgtcgtcgccggcggcgtgctgatcttcggcggcgaactcaacgccttcttccgaaccctgatcttcctggttctggtgatggcgctgctggtcggcgcgcagaacgtgatgagcaccttcttcggtcgtggtgccgaaatcgcggccctcggcaacggggcgctgcaccaggtgcaagtcgcggcggcggatgccgtgcgtgcggtagcggctggacggctcgcctaatcatggctctgcgcacgatccccatccgtcgcgcaggcaaccgagaaaacctgttcatgggtggtgatcgtgaactggtgatgttctcgggcctgatggcgtttgcgctgattttcagcgcccaagagctgcgggccaccgtggtcggtctgatcctgtggttcggggcgctctatgcgttccgaatcatggcgaaggccgatccgaagatgcggttcgtgtacctgcgtcaccgccggtacaagccgtattacccggcccgctcgaccccgttccgcgagaacaccaatagccaagggaagcaataccgatgatccaagcaattgcgattgcaatcgcgggcctcggcgcgcttctgttgttcatcctctttgcccgcatccgcgcggtcgatgccgaactgaaactgaaaaagcatcgttccaaggacgccggcctggccgatctgctcaactacgccgctgtcgtcgatgacggcgtaatcgtgggcaagaacggcagctttatggctgcctggctgtacaagggcgatgacaacgcaagcagcaccgaccagcagcgcgaagtagtgtccgcccgcatcaaccaggccctcgcgggcctgggaagtgggtggatgatccatgtggacgccgtgcggcgtcctgctccgaactacgcggagcggggcctgtcggcgttccctgaccgtctgacggcagcgattgaagaagagcgctcggtcttgccttgctcgtcggtgatgtacttcaccagctccgcgaagtcgctcttcttgatggagcgcatggggacgtgcttggcaatcacgcgcaccccccggccgttttagcggctaaaaaagtcatggctctgccctcgggcggaccacgcccatcatgaccttgccaagctcgtcctgcttctcttcgatcttcgccagcagggcgaggatcgtggcatcaccgaaccgcgccgtgcgcgggtcgtcggtgagccagagtttcagcaggccgcccaggcggcccaggtcgccattgatgcgggccagctcgcggacgtgctcatagtccacgacgcccgtgattttgtagccctggccgacggccagcaggtaggccgacaggctcatgccggccgccgccgccttttcctcaatcgctcttcgttcgtctggaaggcagtacaccttgataggtgggctgcccttcctggttggcttggtttcatcagccatccgcttgccctcatctgttacgccggcggtagccggccagcctcgcagagcaggattcccgttgagcaccgccaggtgcgaataagggacagtgaagaaggaacacccgctcgcgggtgggcctacttcacctatcctgcccggctgacgccgttggatacaccaaggaaagtctacacgaaccctttggcaaaatcctgtatatcgtgcgaaaaaggatggatataccgaaaaaatcgctataatgaccccgaagcagggttatgcagcggaaaagcgctgcttccctgctgttttgtggaatatctaccgactggaaacaggcaaatgcaggaaattactgaactgaggggacaggcgagagacgatgccaaagagctacaccgacgagctggccgagtgggttgaatcccgcgcggccaagaagcgccggcgtgatgaggctgcggttgcgttcctggcggtgagggcggatgtcgaggcggcgttagcgtccggctatgcgctcgtcaccatttgggagcacatgcgggaaacggggaaggtcaagttctcctacgagacgttccgctcgcacgccaggcggcacatcaaggccaagcccgccgatgtgcccgcaccgcaggccaaggctgcggaacccgcgccggcacccaagacgccggagccacggcggccgaagcaggggggcaaggctgaaaagccggcccccgctgcggccccgaccggcttcaccttcaacccaacaccggacaaaaaggatctactgtaatggcgaaaattcacatggttttgcagggcaagggcggggtcggcaagtcggccatcgccgcgatcattgcgcagtacaagatggacaaggggcagacacccttgtgcatcgacaccgacccggtgaacgcgacgttcgagggctacaaggccctgaacgtccgccggctgaacatcatggccggcgacgaaattaactcgcgcaacttcgacaccctggtcgagctgattgcgccgaccaaggatgacgtggtgatcgacaacggtgccagctcgttcgtgcctctgtcgcattacctcatcagcaaccaggtgccggctctgctgcaagaaatggggcatgagctggtcatccataccgtcgtcaccggcggccaggctctcctggacacggtgagcggcttcgcccagctcgccagccagttcccggccgaagcgcttttcgtggtctggctgaacccgtattgggggcctatcgagcatgagggcaagagctttgagcagatgaaggcgtacacggccaacaaggcccgcgtgtcgtccatcatccagattccggccctcaaggaagaaacctacggccgcgatttcagcgacatgctgcaagagcggctgacgttcgaccaggcgctggccgatgaatcgctcacgatcatgacgcggcaacgcctcaagatcgtgcggcgcggcctgtttgaacagctcgacgcggcggccgtgctatgagcgaccagattgaagagctgatccgggagattgcggccaagcacggcatcgccgtcggccgcgacgacccggtgctgatcctgcataccatcaacgcccggctcatggccgacagtgcggccaagcaagaggaaatccttgccgcgttcaaggaagagctggaagggatcgcccatcgttggggcgaggacgccaaggccaaagcggagcggatgctgaacgcggccctggcggccagcaaggacgcaatggcgaaggtaatgaaggacagcgccgcgcaggcggccgaagcgatccgcagggaaatcgacgacggccttggccgccagctcgcggccaaggtcgcggacgcgcggcgcgtggcgatgatgaacatgatcgccggcggcatggtgttgttcgcggccgccctggtggtgtgggcctcgttatgaatcgcagaggcgcagatgaaaaagcccggcgttgccgggctttgtttttgcgttagctgggcttgtttgacaggcccaagctctgactgcgcccgcgctcgcgctcctgggcctgtttcttctcctgctcctgcttgcgcatcagggcctggtgccgtcgggctgcttcacgcatcgaatcccagtcgccggccagctcgggatgctccgcgcgcatcttgcgcgtcgccagttcctcgatcttgggcgcgtgaatgcccatgccttccttgatttcgcgcaccatgtccagccgcgtgtgcagggtctgcaagcgggcttgctgttgggcctgctgctgctgccaggcggcctttgtacgcggcagggacagcaagccgggggcattggactgtagctgctgcaaacgcgcctgctgacggtctacgagctgttctaggcggtcctcgatgcgctccacctggtcatgctttgcctgcacgtagagcgcaagggtctgctggtaggtctgctcgatgggcgcggattctaagagggcctgctgttccgtctcggcctcctgggccgcctgtagcaaatcctcgccgctgttgccgctggactgctttactgccggggactgctgttgccctgctcgcgccgtcgtcgcagttcggcttgcccccactcgattgactgcttcatttcgagccgcagcgatgcgatctcggattgcgtcaacggacggggcagcgcggaggtgtccggcttctccttgggtgagtcggtcgatgccatagccaaaggtttccttccaaaatgcgtccattgctggaccgtgtttctcattgatgcccgcaagcatcttcggcttgaccgccaggtcaagcgcgccttcatgggcggtcatgacggacgccgccatgaccttgccgccgttgttctcgatgtagccgcgtaatgaggcaatggtgccgcccatcgtcagcgtgtcatcgacaacgatgtacttctggccggggatcacctccccctcgaaagtcgggttgaacgccaggcgatgatctgaaccggctccggttcgggcgaccttctcccgctgcacaatgtccgtttcgacctcaaggccaaggcggtcggccagaacgaccgccatcatggccggaatcttgttgttccccgccgcctcgacggcgaggactggaacgatgcggggcttgtcgtcgccgatcagcgtcttgagctgggcaacagtgtcgtccgaaatcaggcgctcgaccaaattaagcgccgcttccgcgtcgccctgcttcgcagcctggtattcaggctcgttggtcaaagaaccaaggtcgccgttgcgaaccaccttcgggaagtctccccacggtgcgcgctcggctctgctgtagctgctcaagacgcctccctttttagccgctaaaactctaacgagtgcgcccgcgactcaacttgacgctttcggcacttacctgtgccttgccacttgcgtcataggtgatgcttttcgcactcccgatttcaggtactttatcgaaatctgaccgggcgtgcattacaaagttcttccccacctgttggtaaatgctgccgctatctgcgtggacgatgctgccgtcgtggcgctgcgacttatcggccttttgggccatatagatgttgtaaatgccaggtttcagggccccggctttatctaccttctggttcgtccatgcgccttggttctcggtctggacaattctttgcccattcatgaccaggaggcggtgtttcattgggtgactcctgacggttgcctctggtgttaaacgtgtcctggtcgcttgccggctaaaaaaaagccgacctcggcagttcgaggccggctttccctagagccgggcgcgtcaaggttgttccatctattttagtgaactgcgttcgatttatcagttactttcctcccgctttgtgtttcctcccactcgtttccgcgtctagccgacccctcaacatagcggcctcttcttgggctgcctttgcctcttgccgcgcttcgtcacgctcggcttgcaccgtcgtaaagcgctcggcctgcctggccgcctcttgcgccgccaacttcctttgctcctggtgggcctcggcgtcggcctgcgccttcgctttcaccgctgccaactccgtgcgcaaactctccgcttcgcgcctggtggcgtcgcgctcgccgcgaagcgcctgcatttcctggttggccgcgtccagggtcttgcggctctcttctttgaatgcgcgggcgtcctggtgagcgtagtccagctcggcgcgcagctcctgcgctcgacgctccacctcgtcggcccgctgcgtcgccagcgcggcccgctgctcggctcctgccagggcggtgcgtgcttcggccagggcttgccgctggcgtgcggccagctcggccgcctcggcggcctgctgctctagcaatgtaacgcgcgcctgggcttcttccagctcgcgggcctgcgcctcgaaggcgtcggccagctccccgcgcacggcttccaactcgttgcgctcacgatcccagccggcttgcgctgcctgcaacgattcattggcaagggcctgggcggcttgccagagggcggccacggcctggttgccggcctgctgcaccgcgtccggcacctggactgccagcggggcggcctgcgccgtgcgctggcgtcgccattcgcgcatgccggcgctggcgtcgttcatgttgacgcgggcggccttacgcactgcatccacggtcgggaagttctcccggtcgccttgctcgaacagctcgtccgcagccgcaaaaatgcggtcgcgcgtctctttgttcagttccatgttggctccggtaattggtaagaataataatactcttacctaccttatcagcgcaagagtttagctgaacagttctcgacttaacggcaggttttttagcggctgaagggcaggcaaaaaaagccccgcacggtcggcgggggcaaagggtcagcgggaaggggattagcgggcgtcgggcttcttcatgcgtcggggccgcgcttcttgggatggagcacgacgaagcgcgcacgcgcatcgtcctcggccctatcggcccgcgtcgcggtcaggaacttgtcgcgcgctaggtcctccctggtgggcaccaggggcatgaactcggcctgctcgatgtaggtccactccatgaccgcatcgcagtcgaggccgcgttccttcaccgtctcttgcaggtcgcggtacgcccgctcgttgagcggctggtaacgggccaattggtcgtaaatggctgtcggccatgagcggcctttcctgttgagccagcagccgacgacgaagccggcaatgcaggcccctggcacaaccaggccgacgccgggggcaggggatggcagcagctcgccaaccaggaaccccgccgcgatgatgccgatgccggtcaaccagcccttgaaactatccggccccgaaacacccctgcgcattgcctggatgctgcgccggatagcttgcaacatcaggagccgtttcttttgttcgtcagtcatggtccgccctcaccagttgttcgtatcggtgtcggacgaactgaaatcgcaagagctgccggtatcggtccagccgctgtccgtgtcgctgctgccgaagcacggcgaggggtccgcgaacgccgcagacggcgtatccggccgcagcgcatcgcccagcatggccccggtcagcgagccgccggccaggtagcccagcatggtgctgttggtcgccccggccaccagggccgacgtgacgaaatcgccgtcattccctctggattgttcgctgctcggcggggcagtgcgccgcgccggcggcgtcgtggatggctcgggttggctggcctgcgacggccggcgaaaggtgcgcagcagctcgttatcgaccggctgcggcgtcggggccgccgccttgcgctgcggtcggtgttccttcttcggctcgcgcagcttgaacagcatgatcgcggaaaccagcagcaacgccgcgcctacgcctcccgcgatgtagaacagcatcggattcattcttcggtcctccttgtagcggaaccgttgtctgtgcggcgcgggtggcccgcgccgctgtctttggggatcagccctcgatgagcgcgaccagtttcacgtcggcaaggttcgcctcgaactcctggccgtcgtcctcgtacttcaaccaggcatagccttccgccggcggccgacggttgaggataaggcgggcagggcgctcgtcgtgctcgacctggacgatggcctttttcagcttgtccgggtccggctccttcgcgcccttttccttggcgtccttaccgtcctggtcgccgtcctcgccgtcctggccgtcgccggcctccgcgtcacgctcggcatcagtctggccgttgaaggcatcgacggtgttgggatcgcggcccttctcgtccaggaactcgcgcagcagcttgaccgtgccgcgcgtgatttcctgggtgtcgtcgtcaagccacgcctcgacttcctccgggcgcttcttgaaggccgtcaccagctcgttcaccacggtcacgtcgcgcacgcggccggtgttgaacgcatcggcgatcttctccggcaggtccagcagcgtgacgtgctgggtgatgaacgccggcgacttgccgatttccttggcgatatcgcctttcttcttgcccttcgccagctcgcggccaatgaagtcggcaatttcgcgcggggtcagctcgttgcgttgcaggttctcgataacctggtcggcttcgttgtagtcgttgtcgatgaacgccgggatggacttcttgccggcccacttcgagccacggtagcggcgggcgccgtgattgatgatatagcggcccggctgctcctggttctcgcgcaccgaaatgggtgacttcaccccgcgctctttgatcgtggcaccgatttccgcgatgctctccggggaaaagccggggttgtcggccgtccgcggctgatgcggatcttcgtcgatcaggtccaggtccagctcgatagggccggaaccgccctgagacgccgcaggagcgtccaggaggctcgacaggtcgccgatgctatccaaccccaggccggacggctgcgccgcgcctgcggcttcctgagcggccgcagcggtgtttttcttggtggtcttggcttgagccgcagtcattgggaaatctccatcttcgtgaacacgtaatcagccagggcgcgaacctctttcgatgccttgcgcgcggccgttttcttgatcttccagaccggcacaccggatgcgagggcatcggcgatgctgctgcgcaggccaacggtggccggaatcatcatcttggggtacgcggccagcagctcggcttggtggcgcgcgtggcgcggattccgcgcatcgaccttgctgggcaccatgccaaggaattgcagcttggcgttcttctggcgcacgttcgcaatggtcgtgaccatcttcttgatgccctggatgctgtacgcctcaagctcgatgggggacagcacatagtcggccgcgaagagggcggccgccaggccgacgccaagggtcggggccgtgtcgatcaggcacacgtcgaagccttggttcgccagggccttgatgttcgccccgaacagctcgcgggcgtcgtccagcgacagccgttcggcgttcgccagtaccgggttggactcgatgagggcgaggcgcgcggcctggccgtcgccggctgcgggtgcggtttcggtccagccgccggcagggacagcgccgaacagcttgcttgcatgcaggccggtagcaaagtccttgagcgtgtaggacgcattgccctgggggtccaggtcgatcacggcaacccgcaagccgcgctcgaaaaagtcgaaggcaagatgcacaagggtcgaagtcttgccgacgccgcctttctggttggccgtgaccaaagttttcatcgtttggtttcctgttttttcttggcgtccgcttcccacttccggacgatgtacgcctgatgttccggcagaaccgccgttacccgcgcgtacccctcgggcaagttcttgtcctcgaacgcggcccacacgcgatgcaccgcttgcgacactgcgcccctggtcagtcccagcgacgttgcgaacgtcgcctgtggcttcccatcgactaagacgccccgcgctatctcgatggtctgctgccccacttccagcccctggatcgcctcctggaactggctttcggtaagccgtttcttcatggataacacccataatttgctccgcgccttggttgaacatagcggtgacagccgccagcacatgagagaagtttagctaaacatttctcgcacgtcaacacctttagccgctaaaactcgtccttggcgtaacaaaacaaaagcccggaaaccgggctttcgtctcttgccgcttatggctctgcacccggctccatcaccaacaggtcgcgcacgcgcttcactcggttgcggatcgacactgccagcccaacaaagccggttgccgccgccgccaggatcgcgccgatgatgccggccacaccggccatcgcccaccaggtcgccgccttccggttccattcctgctggtactgcttcgcaatgctggacctcggctcaccataggctgaccgctcgatggcgtatgccgcttctccccttggcgtaaaacccagcgccgcaggcggcattgccatgctgcccgccgctttcccgaccacgacgcgcgcaccaggcttgcggtccagaccttcggccacggcgagctgcgcaaggacataatcagccgccgacttggctccacgcgcctcgatcagctcttgcactcgcgcgaaatccttggcctccacggccgccatgaatcgcgcacgcggcgaaggctccgcagggccggcgtcgtgatcgccgccgagaatgcccttcaccaagttcgacgacacgaaaatcatgctgacggctatcaccatcatgcagacggatcgcacgaacccgctgaattcaccggtt

SEQ ID NO: 33 - DNA, 4641 bp, Artificial Sequence
  pLMTB7382
tcgcgcgtttcggtgatgacggtgaaaacctctgacacatgcagctcccggagacggtcacagcttgtctgtaagcggatgccgggagcagacaagcccgtcagggcgcgtcagcgggtgttggcgggtgtcggggctggcttaactatgcggcatcagagcagattgtactgagagtgcaccatatgcggtgtgaaataccgcacagatgcgtaaggagaaaataccgcatcaggcgccattcgccattcaggctgcgcaactgttgggaagggcgatcggtgcgggcctcttcgctattacgccagctggcgaaagggggatgtgctgcaaggcgattaagttgggtaacgccagggttttcccagtcacgacgttgtaaaacgacggccagtgaattcgagctcggtacctcgcgaatgcatctacctgcaggttaattaactccgcagggccggcgtcgtgatcgccgccgagaatgcccttcaccaagttcgacgacacgaaaatcatgctgacggctatcaccatcatgcagacggatcgcacgaacccgctgaattcaccggttctagatttatggctagctcagtcctaggtacaatgctagctactagagattaggaggatcgatagcgatcgcaggaggaaacatatgaaaaattttattccttttgcgttacctgaaattggcgaagaagaaattgcagaggtaattgactctttacgttcaggttggattacgacaggtcctaaggctaagcaatttgaacaagaattttctaattacctaggagcgaacgttcaatcattagctgttaactctgctacgtcgggcttacatttggctcttgaagctgttggcgtaaaacctggagaccaagttattgtcccatcatatacattcactgctactgccgaaattgtcaggtaccttggtgctgatcctgtaattgttgatgtagatcgtaaaacatttaatatatcagttgatgccattgagaaggctattactaataaaacaaaggcgattattccagtacacttcgctggattagcttgtgacatggattcaatcttatcaattgctaaaaaatatgacctaaaggttgtcgaggatgccgctcatgcatttcctacaacatataaaggaagtaagataggaacgcttgattcagatgctacggtttttagcttctacgccaataaaactatgacaaccggtgaaggcggaatggttgtttcaaaaaataaagatataattgagcgttgtaaggtaatgcgtttacatggaatcagtcgtgacgcttttgaccggtaccagtctaaaactccttcttggttttatgaggttgtagctccagggtttaaatacaatatgcctgatatctgtgcggcaatcggtattcatcaacttagaaagatcgatgattttcagaaaaaacgtcaacgaatggcaaaaatttacgatgatgcgttaaaagaattgccacttgaattgcctgaatggcctactaatgctagtgatattcatgcttggcatctatatcctatccgcttaaaaactgattcggctattaatcgcgatgattttattaagaagttatcagatcttggaattggttgttctgtccattttataccgttgcataagcaaccggtttggcgtgatacatataatttgaacgccagtgactttccagtttctgaggagtgttatttaaatgaaatatctattcctctttatactaaaatgacggatcaagatcagttgttcgttatcgaatcgattagacaattatttatgtaatggtattttatattaaatgaaacgtatttttgatgttatcgtggcaggcttaggcctgctttttctatttcctgtttttatcattgtgtcaatgttaattgttgctgattctaaagggagtgttttttttaggcagtatagagttgggagatttgggaaagattttaggatacataaatttagaacgatgtttatcgattcagaaaaaaaaggacggataacagttggtcaagatgctcgggtaaccagagttggatggtatttacggaagtacaaaatcgatgagctgcctcaattgatagatgttctttctggaacaatgagtttggttggcccaagaccggaagtgagggagtttattgatgagtatcctgatgatataagggaaaaagttttatcggttaggccagggataactgacttagcatctatagaaatggtagatgaaaatgagattttgtctagttatgatgacccacgtagggcttatatagatataattcttccaatcaagcaaagatattatttggattatgttgctaacaattcagtaaagtatgattgtgtgataatttggaaaactattattaagattaattaacctgcaggggatcccgggcccgtcgactgcagaggcctgcatgcaagcttggcgtaatcatggtcatagctgtttcctgtgtgaaattgttatccgctcacaattccacacaacatacgagccggaagcataaagtgtaaagcctggggtgcctaatgagtgagctaactcacattaattgcgttgcgctcactgcccgctttccagtcgggaaacctgtcgtgccagctgcattaatgaatcggccaacgcgcggggagaggcggtttgcgtattgggcgctcttccgcttcctcgctcactgactcgctgcgctcggtcgttcggctgcggcgagcggtatcagctcactcaaaggcggtaatacggttatccacagaatcaggggataacgcaggaaagaacatgtgagcaaaaggccagcaaaaggccaggaaccgtaaaaaggccgcgttgctggcgtttttccataggctccgcccccctgacgagcatcacaaaaatcgacgctcaagtcagaggtggcgaaacccgacaggactataaagataccaggcgtttccccctggaagctccctcgtgcgctctcctgttccgaccctgccgcttaccggatacctgtccgcctttctcccttcgggaagcgtggcgctttctcatagctcacgctgtaggtatctcagttcggtgtaggtcgttcgctccaagctgggctgtgtgcacgaaccccccgttcagcccgaccgctgcgccttatccggtaactatcgtcttgagtccaacccggtaagacacgacttatcgccactggcagcagccactggtaacaggattagcagagcgaggtatgtaggcggtgctacagagttcttgaagtggtggcctaactacggctacactagaagaacagtatttggtatctgcgctctgctgaagccagttaccttcggaaaaagagttggtagctcttgatccggcaaacaaaccaccgctggtagcggtggtttttttgtttgcaagcagcagattacgcgcagaaaaaaaggatctcaagaagatcctttgatcttttctacggggtctgacgctcagtggaacgaaaactcacgttaagggattttggtcatgagattatcaaaaaggatcttcacctagatccttttaaattaaaaatgaagttttaaatcaatctaaagtatatatgagtaaacttggtctgacagttagaaaaactcatcgagcatcaaatgaaactgcaatttattcatatcaggattatcaataccatatttttgaaaaagccgtttctgtaatgaaggagaaaactcaccgaggcagttccataggatggcaagatcctggtatcggtctgcgattccgactcgtccaacatcaatacaacctattaatttcccctcgtcaaaaataaggttatcaagtgagaaatcaccatgagtgacgactgaatccggtgagaatggcaaaagtttatgcatttctttccagacttgttcaacaggccagccattacgctcgtcatcaaaatcactcgcatcaaccaaaccgttattcattcgtgattgcgcctgagcgagacgaaatacgcgatcgctgttaaaaggacaattacaaacaggaatcgaatgcaaccggcgcaggaacactgccagcgcatcaacaatattttcacctgaatcaggatattcttctaatacctggaatgctgttttcccagggatcgcagtggtgagtaaccatgcatcatcaggagtacggataaaatgcttgatggtcggaagaggcataaattccgtcagccagtttagtctgaccatctcatctgtaacatcattggcaacgctacctttgccatgtttcagaaacaactctggcgcatcgggcttcccatacaatcgatagattgtcgcacctgattgcccgacattatcgcgagcccatttatacccatataaatcagcatccatgttggaatttaatcgcggcctagagcaagacgtttcccgttgaatatggctcatactcttcctttttcaatattattgaagcatttatcagggttattgtctcatgagcggatacatatttgaatgtatttagaaaaataaacaaataggggttccgcgcacatttccccgaaaagtgccacctgacgtctaagaaaccattattatcatgacattaacctataaaaataggcgtatcacgaggc

SEQ ID NO: 34 - DNA, 4382 bp, Artificial Sequence
  pLMTB7383
tcgcgcgtttcggtgatgacggtgaaaacctctgacacatgcagctcccggagacggtcacagcttgtctgtaagcggatgccgggagcagacaagcccgtcagggcgcgtcagcgggtgttggcgggtgtcggggctggcttaactatgcggcatcagagcagattgtactgagagtgcaccatatgcggtgtgaaataccgcacagatgcgtaaggagaaaataccgcatcaggcgccattcgccattcaggctgcgcaactgttgggaagggcgatcggtgcgggcctcttcgctattacgccagctggcgaaagggggatgtgctgcaaggcgattaagttgggtaacgccagggttttcccagtcacgacgttgtaaaacgacggccagtgaattcgagctcggtacctcgcgaatgcatctacctgcaggttaattaatttatcggttaggccagggataactgacttagcatctatagaaatggtagatgaaaatgagattttgtctagttatgatgacccacgtagggcttatatagatataattcttccaatcaagcaaagatattatttggattatgttgctaacaattcagtaaagtatgattgtgtgataatttggaaaactattattaagattttgtcgcgataataaggtagtgtaggatgattgatagaatattggagctgccaagaattgttaagagaggtatcatcatctgcattgatgtagttatggtgatattctcattttggttgtcttattggttgaggcttgatgagcaaacggcttttcttagtgcaccgatgtggtttgctgcagctattcttaccatatttaccgtgtttatatttatcaggattgggctttatcgggcagtcttacggtatgttagtgcaaagataatgttgctaatatcagttggtattctggcctcaacgttatctcttgtcgttatatcatattcgctatccataatgttgccgcgcactgttgtcggaatttattttttggttttacttttactgacatcaggctctagattgctttttagaatgatacttaactatggagttaagggtagtgcgcctgttttgatttatggcgctggtgaatctggccgacaattattgccagcattaatgcaggcaaaagaatattttcctgtggcatttgtggatgataatcctcgcttgcataaggccgtcattcatggtgtaacagtttatccctcggataaactgagttacctagtagatcgctatggtataaagaaaattcttttggcgatgccgagcgtcagtaagtcacaaaggcagaaagtgattactcgtttagagcatttaccgtgtgaagttctctctattccgggcatggtcgatttagtcgaaggtcgagcacaaatcagtaatctcaaaaaagtatcgattgatgacttgctaggccgtgatccagttgctcctgatgccaaattgatggcggagaacattacaggcaaagcagttatggtcactggggcgggaggatcgatcggctctgagctttgtcgtcaaattgttcgatataagccagccaaattggttctatttgaactgtctgaatatgccctgtatgccattgagaaagagctatcgacgctgtgtgataaagaaggtttggatgtctcagtgatccctctgttgggctcggtgcagcgtcagaatcgcttacagatggtgatgaagtcctttggtattcaaacggtttatcatgcggctgcttataaacatgtgcctctggttgagcataatgtggtggaaggggtgcgtaataatgtgtttggtaccttgtactgcgctgagtcggcgatcgatagtggcgttgaaacctttgtgttgatttccaccgataaagcggtgcggccgaccaacactatggggacaaccaagcgcctggctgagttggtattgcaggcgttgtctgcacggcaaagcaaaacccgtttttgtatggtgcgatttggtaatgtgctgggatcctcgggctcagttgtaccattgtttgaaaagcagattgcccaaggtgggccagttaccctgactcatcgtgacattattcgctattttatgacaattcctgaagcatcgcagttggtgatttaattaacctgcaggggatcccgggcccgtcgactgcagaggcctgcatgcaagcttggcgtaatcatggtcatagctgtttcctgtgtgaaattgttatccgctcacaattccacacaacatacgagccggaagcataaagtgtaaagcctggggtgcctaatgagtgagctaactcacattaattgcgttgcgctcactgcccgctttccagtcgggaaacctgtcgtgccagctgcattaatgaatcggccaacgcgcggggagaggcggtttgcgtattgggcgctcttccgcttcctcgctcactgactcgctgcgctcggtcgttcggctgcggcgagcggtatcagctcactcaaaggcggtaatacggttatccacagaatcaggggataacgcaggaaagaacatgtgagcaaaaggccagcaaaaggccaggaaccgtaaaaaggccgcgttgctggcgtttttccataggctccgcccccctgacgagcatcacaaaaatcgacgctcaagtcagaggtggcgaaacccgacaggactataaagataccaggcgtttccccctggaagctccctcgtgcgctctcctgttccgaccctgccgcttaccggatacctgtccgcctttctcccttcgggaagcgtggcgctttctcatagctcacgctgtaggtatctcagttcggtgtaggtcgttcgctccaagctgggctgtgtgcacgaaccccccgttcagcccgaccgctgcgccttatccggtaactatcgtcttgagtccaacccggtaagacacgacttatcgccactggcagcagccactggtaacaggattagcagagcgaggtatgtaggcggtgctacagagttcttgaagtggtggcctaactacggctacactagaagaacagtatttggtatctgcgctctgctgaagccagttaccttcggaaaaagagttggtagctcttgatccggcaaacaaaccaccgctggtagcggtggtttttttgtttgcaagcagcagattacgcgcagaaaaaaaggatctcaagaagatcctttgatcttttctacggggtctgacgctcagtggaacgaaaactcacgttaagggattttggtcatgagattatcaaaaaggatcttcacctagatccttttaaattaaaaatgaagttttaaatcaatctaaagtatatatgagtaaacttggtctgacagttagaaaaactcatcgagcatcaaatgaaactgcaatttattcatatcaggattatcaataccatatttttgaaaaagccgtttctgtaatgaaggagaaaactcaccgaggcagttccataggatggcaagatcctggtatcggtctgcgattccgactcgtccaacatcaatacaacctattaatttcccctcgtcaaaaataaggttatcaagtgagaaatcaccatgagtgacgactgaatccggtgagaatggcaaaagtttatgcatttctttccagacttgttcaacaggccagccattacgctcgtcatcaaaatcactcgcatcaaccaaaccgttattcattcgtgattgcgcctgagcgagacgaaatacgcgatcgctgttaaaaggacaattacaaacaggaatcgaatgcaaccggcgcaggaacactgccagcgcatcaacaatattttcacctgaatcaggatattcttctaatacctggaatgctgttttcccagggatcgcagtggtgagtaaccatgcatcatcaggagtacggataaaatgcttgatggtcggaagaggcataaattccgtcagccagtttagtctgaccatctcatctgtaacatcattggcaacgctacctttgccatgtttcagaaacaactctggcgcatcgggcttcccatacaatcgatagattgtcgcacctgattgcccgacattatcgcgagcccatttatacccatataaatcagcatccatgttggaatttaatcgcggcctagagcaagacgtttcccgttgaatatggctcatactcttcctttttcaatattattgaagcatttatcagggttattgtctcatgagcggatacatatttgaatgtatttagaaaaataaacaaataggggttccgcgcacatttccccgaaaagtgccacctgacgtctaagaaaccattattatcatgacattaacctataaaaataggcgtatcacgaggc

SEQ ID NO: 35 - DNA, 4582 bp, Artificial Sequence
  pLMTB7384
tcgcgcgtttcggtgatgacggtgaaaacctctgacacatgcagctcccggagacggtcacagcttgtctgtaagcggatgccgggagcagacaagcccgtcagggcgcgtcagcgggtgttggcgggtgtcggggctggcttaactatgcggcatcagagcagattgtactgagagtgcaccatatgcggtgtgaaataccgcacagatgcgtaaggagaaaataccgcatcaggcgccattcgccattcaggctgcgcaactgttgggaagggcgatcggtgcgggcctcttcgctattacgccagctggcgaaagggggatgtgctgcaaggcgattaagttgggtaacgccagggttttcccagtcacgacgttgtaaaacgacggccagtgaattcgagctcggtacctcgcgaatgcatctacctgcaggttaattaagagttggtattgcaggcgttgtctgcacggcaaagcaaaacccgtttttgtatggtgcgatttggtaatgtgctgggatcctcgggctcagttgtaccattgtttgaaaagcagattgcccaaggtgggccagttaccctgactcatcgtgacattattcgctattttatgacaattcctgaagcatcgcagttggtgattcaagcgggggcgatggggcatggcggcgatgtctttgtcttagacatgggcgatccggttaagatttatgacttagccaaacgcatgatccggttaagtggcttgactgtgcgggatgataaaaatccagatggcgatattgccattgaagttacgggattacgtccaggtgagaaactgtatgaagaattactgattggtgattcagttcaaggtacctctcatccacgaattatgacggccaacgaagtgatgctaccgtggcaggatctatcgctcttacttaaagagctggatcaagcctgtcatgactttgatcatgagcgcattcgcagcttattgttacaagcaccagcggcattcaatccaactgatgatatttgcgatctagtttggcagcagaaaaaatcgctgttatcacaagcgagcaatgtcatacgcctgtgaaggaggacagctatgaatttacaaaagaaaaaaattatgttaataactaatcatgacgatgatatctattgttttcgaaaagaagttatagagtcactagttgagtatgggtatgaagtgctagtgtcatgtccttatggagataagatagagttgatgaagtctattcaatttgagtatgaagatattactattgatagaagaggaataaaccctttaaaagatattcgtctatttcttagttatataagattattgagaaaatatagaccggatgtagtcttgacatataccgtgaaaccaaatgtatatgctagcctagctgcaacaattttaggaataaaatatataaataacgtaacaggtttaggtagtgtcttaacaatgggttcttgtgtaagaagcctggtgttattactgtttagaatttcttttaggaaatcaaattgtgttttttttcaaaatgaatataatatgaaaatgttaaaaactcttggcttgattttgggtgactctaagctgatacctgggtcaggagtgaacattgaaaagtatcctgtgcaacagtatccaaatggtggaaatggaattcaaggagaaacaatcgtttttaattttattggtaggatattaaaagaaaaaggtatagatacttatctggctgctgcccaaattattaagagtcgatatcccaaaacagagtttaatattattggctttatagaaccgacagagagtaattatgaacttaaaatttgtgacttagaaaaaaaaggaatcgtttattatttgggacaacaaaaagatgtgatacctcatattacccgttcccatgcaattatccatcccagtgtgtatggtgaaggaatgagcaatgtattactagaaaacgctagttcaggacgtgttttaattacgacagataatccaggttgcaaagaaattgttaaagatagagagacaggctatatatttcaagggggaaatgttgaggaactagtctctatattggaagtttttttaggtctagaaaatgaaaaacgaaaagagatgggacttcaagggagaatgtatatagagcaatatttttctcgtcaaattattatagatgcttatttagataaaataaaaggagctttagatgaataggattataaaaaatattgttggtttacttcgtgcaaatatttgcttgatattattaaaagtgtgtcgaaacaaggatcttacttttcattattttttaaaatttttaattaacctgcaggggatcccgggcccgtcgactgcagaggcctgcatgcaagcttggcgtaatcatggtcatagctgtttcctgtgtgaaattgttatccgctcacaattccacacaacatacgagccggaagcataaagtgtaaagcctggggtgcctaatgagtgagctaactcacattaattgcgttgcgctcactgcccgctttccagtcgggaaacctgtcgtgccagctgcattaatgaatcggccaacgcgcggggagaggcggtttgcgtattgggcgctcttccgcttcctcgctcactgactcgctgcgctcggtcgttcggctgcggcgagcggtatcagctcactcaaaggcggtaatacggttatccacagaatcaggggataacgcaggaaagaacatgtgagcaaaaggccagcaaaaggccaggaaccgtaaaaaggccgcgttgctggcgtttttccataggctccgcccccctgacgagcatcacaaaaatcgacgctcaagtcagaggtggcgaaacccgacaggactataaagataccaggcgtttccccctggaagctccctcgtgcgctctcctgttccgaccctgccgcttaccggatacctgtccgcctttctcccttcgggaagcgtggcgctttctcatagctcacgctgtaggtatctcagttcggtgtaggtcgttcgctccaagctgggctgtgtgcacgaaccccccgttcagcccgaccgctgcgccttatccggtaactatcgtcttgagtccaacccggtaagacacgacttatcgccactggcagcagccactggtaacaggattagcagagcgaggtatgtaggcggtgctacagagttcttgaagtggtggcctaactacggctacactagaagaacagtatttggtatctgcgctctgctgaagccagttaccttcggaaaaagagttggtagctcttgatccggcaaacaaaccaccgctggtagcggtggtttttttgtttgcaagcagcagattacgcgcagaaaaaaaggatctcaagaagatcctttgatcttttctacggggtctgacgctcagtggaacgaaaactcacgttaagggattttggtcatgagattatcaaaaaggatcttcacctagatccttttaaattaaaaatgaagttttaaatcaatctaaagtatatatgagtaaacttggtctgacagttagaaaaactcatcgagcatcaaatgaaactgcaatttattcatatcaggattatcaataccatatttttgaaaaagccgtttctgtaatgaaggagaaaactcaccgaggcagttccataggatggcaagatcctggtatcggtctgcgattccgactcgtccaacatcaatacaacctattaatttcccctcgtcaaaaataaggttatcaagtgagaaatcaccatgagtgacgactgaatccggtgagaatggcaaaagtttatgcatttctttccagacttgttcaacaggccagccattacgctcgtcatcaaaatcactcgcatcaaccaaaccgttattcattcgtgattgcgcctgagcgagacgaaatacgcgatcgctgttaaaaggacaattacaaacaggaatcgaatgcaaccggcgcaggaacactgccagcgcatcaacaatattttcacctgaatcaggatattcttctaatacctggaatgctgttttcccagggatcgcagtggtgagtaaccatgcatcatcaggagtacggataaaatgcttgatggtcggaagaggcataaattccgtcagccagtttagtctgaccatctcatctgtaacatcattggcaacgctacctttgccatgtttcagaaacaactctggcgcatcgggcttcccatacaatcgatagattgtcgcacctgattgcccgacattatcgcgagcccatttatacccatataaatcagcatccatgttggaatttaatcgcggcctagagcaagacgtttcccgttgaatatggctcatactcttcctttttcaatattattgaagcatttatcagggttattgtctcatgagcggatacatatttgaatgtatttagaaaaataaacaaataggggttccgcgcacatttccccgaaaagtgccacctgacgtctaagaaaccattattatcatgacattaacctataaaaataggcgtatcacgaggc

SEQ ID NO: 36 - DNA, 4582 bp, Artificial Sequence
  pLMTB7385
tcgcgcgtttcggtgatgacggtgaaaacctctgacacatgcagctcccggagacggtcacagcttgtctgtaagcggatgccgggagcagacaagcccgtcagggcgcgtcagcgggtgttggcgggtgtcggggctggcttaactatgcggcatcagagcagattgtactgagagtgcaccatatgcggtgtgaaataccgcacagatgcgtaaggagaaaataccgcatcaggcgccattcgccattcaggctgcgcaactgttgggaagggcgatcggtgcgggcctcttcgctattacgccagctggcgaaagggggatgtgctgcaaggcgattaagttgggtaacgccagggttttcccagtcacgacgttgtaaaacgacggccagtgaattcgagctcggtacctcgcgaatgcatctacctgcaggttaattaagggacttcaagggagaatgtatatagagcaatatttttctcgtcaaattattatagatgcttatttagataaaataaaaggagctttagatgaataggattataaaaaatattgttggtttacttcgtgcaaatatttgcttgatattattaaaagtgtgtcgaaacaaggatcttacttttcattattttttaaaatttggaaagaatgtaactgtcgaacaggaatctaatgctaaattaatcttaggaaaaaagattagagtaaacgccgggggagtattgaaagttagaaaaggagcaaaactcaagatttctgatgatgtatttttgagtaataattgtatgatagcttgtcgtaaatacatagatattaaatctggagtaaaatgtggtcctggagtacttatatatgatcatgactatgatgttagtgttccaggtggattgaaagcaaaaaaatttaagacggccccagttatgattggagaaaatgtttggattggagctaacagcattgtcttgaagggagtgagtattggtgagaatagtgtggttgcagcaggaagtgttgtaacaaaggatattccagctgatactatatttattcagaaacgtttatcaagggagatgaaattatgaaagtatttatagcgactgaatttagatgtacaatctataaaaatgaaatatatttaaaaccgaaagcttattttatttatgagcgctatgctaaagcatttggagagattgtactatgtagtcgttatgagaaggtggaatcataccctgaaggatatcataaagcgaactttattaataaatttatccctatagaaggtctacatcaggttctatttggtcaaaataaaaataagattattgaaggaatgattgatagcgacttaatagttgttcgtattccgtctataattggatcaaaaactgcagactacgcattgaagataggtaagccgtatctgacagaaataatgggggatgcttgggattcttactggtatcatagtttaaagggaaaattattagctccatatatatacgccaaaactaaatcaattgtaaaaaacgctaattattgcatatacgtgacagaaaaatatttacaagatagatatcctaatattaaatctaatatcgttgcttcaaatgttaatattacctctgtagagaatagatctttgaagagccgtctttataagttgaaaaaatttaatcctcaaaaaatttcaataatgacaacagcatctgtgaatgtacgagccaagggccatagatttgtattggaagcaatgaagagattagaaatacaaggtattttgttggattattatttagcaggtgatggtgatcaaagtttcttaaaaaagaaagcagaggaattgggagtagcgaatagaatccattttttaggggaattgactacatcacaaatttatgagtatttggataaagttgatttatatatacaaccaagtttacaagaagggttacctcgtgcggtaattgaagctatgagccgtgcttgcccttgtatagggtctaataaagcaggaattccagagttgctggggccacattgtctatttactccatcctcttcacaagcgattgcgggatctattatagattttattagtatggataaggaaaagatggtgataaaacagtttgaattctcaaaaaaatttctttcgagtgtattaaataaacgcagaagtgactattttgctcaaattagaagagaattaaataattctgatggtttagattaaaatgcgatggaaaatccgtttcgatatattaaatatgctataaaaactgactacatagccaatcaaatttttgaatacgcattacgtttaaattattagttaaaggaattaattaacctgcaggggatcccgggcccgtcgactgcagaggcctgcatgcaagcttggcgtaatcatggtcatagctgtttcctgtgtgaaattgttatccgctcacaattccacacaacatacgagccggaagcataaagtgtaaagcctggggtgcctaatgagtgagctaactcacattaattgcgttgcgctcactgcccgctttccagtcgggaaacctgtcgtgccagctgcattaatgaatcggccaacgcgcggggagaggcggtttgcgtattgggcgctcttccgcttcctcgctcactgactcgctgcgctcggtcgttcggctgcggcgagcggtatcagctcactcaaaggcggtaatacggttatccacagaatcaggggataacgcaggaaagaacatgtgagcaaaaggccagcaaaaggccaggaaccgtaaaaaggccgcgttgctggcgtttttccataggctccgcccccctgacgagcatcacaaaaatcgacgctcaagtcagaggtggcgaaacccgacaggactataaagataccaggcgtttccccctggaagctccctcgtgcgctctcctgttccgaccctgccgcttaccggatacctgtccgcctttctcccttcgggaagcgtggcgctttctcatagctcacgctgtaggtatctcagttcggtgtaggtcgttcgctccaagctgggctgtgtgcacgaaccccccgttcagcccgaccgctgcgccttatccggtaactatcgtcttgagtccaacccggtaagacacgacttatcgccactggcagcagccactggtaacaggattagcagagcgaggtatgtaggcggtgctacagagttcttgaagtggtggcctaactacggctacactagaagaacagtatttggtatctgcgctctgctgaagccagttaccttcggaaaaagagttggtagctcttgatccggcaaacaaaccaccgctggtagcggtggtttttttgtttgcaagcagcagattacgcgcagaaaaaaaggatctcaagaagatcctttgatcttttctacggggtctgacgctcagtggaacgaaaactcacgttaagggattttggtcatgagattatcaaaaaggatcttcacctagatccttttaaattaaaaatgaagttttaaatcaatctaaagtatatatgagtaaacttggtctgacagttagaaaaactcatcgagcatcaaatgaaactgcaatttattcatatcaggattatcaataccatatttttgaaaaagccgtttctgtaatgaaggagaaaactcaccgaggcagttccataggatggcaagatcctggtatcggtctgcgattccgactcgtccaacatcaatacaacctattaatttcccctcgtcaaaaataaggttatcaagtgagaaatcaccatgagtgacgactgaatccggtgagaatggcaaaagtttatgcatttctttccagacttgttcaacaggccagccattacgctcgtcatcaaaatcactcgcatcaaccaaaccgttattcattcgtgattgcgcctgagcgagacgaaatacgcgatcgctgttaaaaggacaattacaaacaggaatcgaatgcaaccggcgcaggaacactgccagcgcatcaacaatattttcacctgaatcaggatattcttctaatacctggaatgctgttttcccagggatcgcagtggtgagtaaccatgcatcatcaggagtacggataaaatgcttgatggtcggaagaggcataaattccgtcagccagtttagtctgaccatctcatctgtaacatcattggcaacgctacctttgccatgtttcagaaacaactctggcgcatcgggcttcccatacaatcgatagattgtcgcacctgattgcccgacattatcgcgagcccatttatacccatataaatcagcatccatgttggaatttaatcgcggcctagagcaagacgtttcccgttgaatatggctcatactcttcctttttcaatattattgaagcatttatcagggttattgtctcatgagcggatacatatttgaatgtatttagaaaaataaacaaataggggttccgcgcacatttccccgaaaagtgccacctgacgtctaagaaaccattattatcatgacattaacctataaaaataggcgtatcacgaggc

SEQ ID NO: 37 - DNA, 4582 bp, Artificial Sequence
  pLMTB7386
tcgcgcgtttcggtgatgacggtgaaaacctctgacacatgcagctcccggagacggtcacagcttgtctgtaagcggatgccgggagcagacaagcccgtcagggcgcgtcagcgggtgttggcgggtgtcggggctggcttaactatgcggcatcagagcagattgtactgagagtgcaccatatgcggtgtgaaataccgcacagatgcgtaaggagaaaataccgcatcaggcgccattcgccattcaggctgcgcaactgttgggaagggcgatcggtgcgggcctcttcgctattacgccagctggcgaaagggggatgtgctgcaaggcgattaagttgggtaacgccagggttttcccagtcacgacgttgtaaaacgacggccagtgaattcgagctcggtacctcgcgaatgcatctacctgcaggttaattaaaaaaatttctttcgagtgtattaaataaacgcagaagtgactattttgctcaaattagaagagaattaaataattctgatggtttagattaaaatgcgatggaaaatccgtttcgatatattaaatatgctataaaaactgactacatagccaatcaaatttttgaatacgcattacgtttaaattattagttaaaggaaaaaagtaaatgaagtttagtctacaatcaaatgatataaaaaataaaataatacttctagtaggtgtagttttttcagggactttaattttatgcagtgaaaataatgatgttacaattccattattttcaatgatttttttaagttttatggcaatgataattgtgaaatttaatatttttcatccctatgtgtggtatagtagcttctttactatttattctatttcttacccgctactctatagaatggagtatataaactatggttatacaaaagatttgattttcatgcaatggctggctttggcaactttgttgttaactctaccttctaaagccattgtgttaagcgaaaggaaaataaacctaaataacaataactatttattatttctcaataatatgaatacgtttatcacaacagtagcaattatatatctattaggaagtggttttagaaataaaggggaaatatattcaggtgccaatattgtgataatgttagtattttctttggtttattttatgattctcattcatacatatcagctatttatacagttgagtactaaaaaatggagactactaaattgtaatactaacacagcgatagttatctgtctcttctctatcgttacaggggaaagagattatatgtttactttattcatccttgatgtgattatattattttactttcacaaaataaaacgtttttatcttgtaatgttagttccgcttgcggcactactgattccgttatctgcagtttttaaatatactttattaagtgggcaagtttcatctataaatacaaataatatttggtttgatttgctagatggtgagtttgtatcagctagtcgtaatttacagattctgatattacataatatgggcaattatttcgaaggtcgttctttttttaatgacatagtaagaattttttataatacggggtattctaatcaaacttggtttatggacaccttttttccaaacgtacattcaaccaaatatggttttactcttgtgggagagggatatgtgaatggaggatactttggaattgtaatgatttttatgctaacaggctttttgatgagatttctttatataaacgctcaaagaaatatatacgggatgctgatatatctgtatatgatacctatttttatttattctactcgtgctgattttgctaacatattatctccattacttaaatatgctatattgggaacattggttattgtttttatcaatagaatggtgttgatatcaccattggatgaaatgggtggtgagtagtttatttaaaaaggtggggtatactttttgatactatagtggtttgaagttggagtagtacaatgcagcttctaaagaatttttataaattactttaaattccctaatcgttttgttcatattctatttcaatatactataattttaaatttactgttataaaatttaacatacggagaaaataagtgagactatctaagaaatattggtttgctttaacgagtaaatttttgttaatcttattaacacttttatcctcaattataattaataggggattaggtgttgaaaaaaaaggagattatgcctatgtaatgaacttagtagaaattttttatattttaggtggagttggtttaggtcaggcttactcgacctttaaaaggattaattaacctgcaggggatcccgggcccgtcgactgcagaggcctgcatgcaagcttggcgtaatcatggtcatagctgtttcctgtgtgaaattgttatccgctcacaattccacacaacatacgagccggaagcataaagtgtaaagcctggggtgcctaatgagtgagctaactcacattaattgcgttgcgctcactgcccgctttccagtcgggaaacctgtcgtgccagctgcattaatgaatcggccaacgcgcggggagaggcggtttgcgtattgggcgctcttccgcttcctcgctcactgactcgctgcgctcggtcgttcggctgcggcgagcggtatcagctcactcaaaggcggtaatacggttatccacagaatcaggggataacgcaggaaagaacatgtgagcaaaaggccagcaaaaggccaggaaccgtaaaaaggccgcgttgctggcgtttttccataggctccgcccccctgacgagcatcacaaaaatcgacgctcaagtcagaggtggcgaaacccgacaggactataaagataccaggcgtttccccctggaagctccctcgtgcgctctcctgttccgaccctgccgcttaccggatacctgtccgcctttctcccttcgggaagcgtggcgctttctcatagctcacgctgtaggtatctcagttcggtgtaggtcgttcgctccaagctgggctgtgtgcacgaaccccccgttcagcccgaccgctgcgccttatccggtaactatcgtcttgagtccaacccggtaagacacgacttatcgccactggcagcagccactggtaacaggattagcagagcgaggtatgtaggcggtgctacagagttcttgaagtggtggcctaactacggctacactagaagaacagtatttggtatctgcgctctgctgaagccagttaccttcggaaaaagagttggtagctcttgatccggcaaacaaaccaccgctggtagcggtggtttttttgtttgcaagcagcagattacgcgcagaaaaaaaggatctcaagaagatcctttgatcttttctacggggtctgacgctcagtggaacgaaaactcacgttaagggattttggtcatgagattatcaaaaaggatcttcacctagatccttttaaattaaaaatgaagttttaaatcaatctaaagtatatatgagtaaacttggtctgacagttagaaaaactcatcgagcatcaaatgaaactgcaatttattcatatcaggattatcaataccatatttttgaaaaagccgtttctgtaatgaaggagaaaactcaccgaggcagttccataggatggcaagatcctggtatcggtctgcgattccgactcgtccaacatcaatacaacctattaatttcccctcgtcaaaaataaggttatcaagtgagaaatcaccatgagtgacgactgaatccggtgagaatggcaaaagtttatgcatttctttccagacttgttcaacaggccagccattacgctcgtcatcaaaatcactcgcatcaaccaaaccgttattcattcgtgattgcgcctgagcgagacgaaatacgcgatcgctgttaaaaggacaattacaaacaggaatcgaatgcaaccggcgcaggaacactgccagcgcatcaacaatattttcacctgaatcaggatattcttctaatacctggaatgctgttttcccagggatcgcagtggtgagtaaccatgcatcatcaggagtacggataaaatgcttgatggtcggaagaggcataaattccgtcagccagtttagtctgaccatctcatctgtaacatcattggcaacgctacctttgccatgtttcagaaacaactctggcgcatcgggcttcccatacaatcgatagattgtcgcacctgattgcccgacattatcgcgagcccatttatacccatataaatcagcatccatgttggaatttaatcgcggcctagagcaagacgtttcccgttgaatatggctcatactcttcctttttcaatattattgaagcatttatcagggttattgtctcatgagcggatacatatttgaatgtatttagaaaaataaacaaataggggttccgcgcacatttccccgaaaagtgccacctgacgtctaagaaaccattattatcatgacattaacctataaaaataggcgtatcacgaggc

SEQ ID NO: 38 - DNA, 4582 bp, Artificial Sequence
  pLMTB7387
tcgcgcgtttcggtgatgacggtgaaaacctctgacacatgcagctcccggagacggtcacagcttgtctgtaagcggatgccgggagcagacaagcccgtcagggcgcgtcagcgggtgttggcgggtgtcggggctggcttaactatgcggcatcagagcagattgtactgagagtgcaccatatgcggtgtgaaataccgcacagatgcgtaaggagaaaataccgcatcaggcgccattcgccattcaggctgcgcaactgttgggaagggcgatcggtgcgggcctcttcgctattacgccagctggcgaaagggggatgtgctgcaaggcgattaagttgggtaacgccagggttttcccagtcacgacgttgtaaaacgacggccagtgaattcgagctcggtacctcgcgaatgcatctacctgcaggttaattaagagactatctaagaaatattggtttgctttaacgagtaaatttttgttaatcttattaacacttttatcctcaattataattaataggggattaggtgttgaaaaaaaaggagattatgcctatgtaatgaacttagtagaaattttttatattttaggtggagttggtttaggtcaggcttactcgacctttaaaaggaatcattctaatgagtatcagaataaatttgtttttttaacttttattcaaggattattgtttggaataataggtttaataatagttttagctgatgttccgatagattatggtggggtaataatagttttgtccagtctatctattatgagaacaaatcttactatgattgcagtaatagaaaatagtataaagaggaataagattgtattaggagtaagcgtagtatattccgttatgctagtattgttgttactatttcatttagtttctatagagatggtatttttggtatatgctattaatgaatttttacgtatcattttatttttatactattacaatatgttcccagtttttgaacatattagtattaaagaatttttcactatatataagtttggatttctttctatgattcttactctattaattacatttaattatagtattgatatcataatgttgaagcaaatgtctagtagttataatgtaggtatatacagtgtcgcagttacgttttctaatatgtttttgatggttccagactcatttaaagagattttatttggtgattcggctaaaagaacttttgagaaaaataaagcaataaatgcaataaaagtatcatttctatttatgattttattaattattggatttctttcttttggagaatttgcgattacgctcctttatggttccagttatataaaggcatttcctataacattagtcatttttttaggaagcttatcgatgattttctttaaaattttacaaccaatttatatatctcagggtaaacagagtgtagctataaaaattttatctgtgtcggctttgataaatataagtttaaactggtacttaattcctaactaccaaattacaggagctgcgatagcatcagcaatctcttatactgtatgtggtttgttttttattatagattatcttagaaattgattataatagttgttaaagaatgtgtattagtggatgaaaatataaaaataacaagaggtattatgatatgagaggaaaaacaattctaattacaggagtagctggttttattggatcaaatctggttaggaaattattggaattagaaggaacgatgacaatcattggtttggacaatttgaatgattactatgatattgcacttaaagattatcgattgcttcaacttaataagctaattcaggattatccagaaaaaaactggatatttatcaagggtgatattgcagataaaatgcttattaataagatttttaagagttatcatcctcagattgttgttaatctagctgcccaggcaggagtacgctactccattacaaatccagatgtatatatagaaagtaatatcgttggctttcataatgtgttggaagcttgtcgtcattcgtatgagatatatgatggtggtgtggaacacttagtttatgcatcgtcctcatcggtatatggtggaaataaaaaaatcccgtttgcaacagaagataaggtagacaatcctatttcactatatgctgcgactaaaaaaacaaatgaacttcaagcgtatgcttattcaaagatttacaatattccttcgacaggcttacgcttttttacagtttatggtcctgctgggcgcccagatatggcctattttggatttacagataaattgcgaagtggttccgattaattaacctgcaggggatcccgggcccgtcgactgcagaggcctgcatgcaagcttggcgtaatcatggtcatagctgtttcctgtgtgaaattgttatccgctcacaattccacacaacatacgagccggaagcataaagtgtaaagcctggggtgcctaatgagtgagctaactcacattaattgcgttgcgctcactgcccgctttccagtcgggaaacctgtcgtgccagctgcattaatgaatcggccaacgcgcggggagaggcggtttgcgtattgggcgctcttccgcttcctcgctcactgactcgctgcgctcggtcgttcggctgcggcgagcggtatcagctcactcaaaggcggtaatacggttatccacagaatcaggggataacgcaggaaagaacatgtgagcaaaaggccagcaaaaggccaggaaccgtaaaaaggccgcgttgctggcgtttttccataggctccgcccccctgacgagcatcacaaaaatcgacgctcaagtcagaggtggcgaaacccgacaggactataaagataccaggcgtttccccctggaagctccctcgtgcgctctcctgttccgaccctgccgcttaccggatacctgtccgcctttctcccttcgggaagcgtggcgctttctcatagctcacgctgtaggtatctcagttcggtgtaggtcgttcgctccaagctgggctgtgtgcacgaaccccccgttcagcccgaccgctgcgccttatccggtaactatcgtcttgagtccaacccggtaagacacgacttatcgccactggcagcagccactggtaacaggattagcagagcgaggtatgtaggcggtgctacagagttcttgaagtggtggcctaactacggctacactagaagaacagtatttggtatctgcgctctgctgaagccagttaccttcggaaaaagagttggtagctcttgatccggcaaacaaaccaccgctggtagcggtggtttttttgtttgcaagcagcagattacgcgcagaaaaaaaggatctcaagaagatcctttgatcttttctacggggtctgacgctcagtggaacgaaaactcacgttaagggattttggtcatgagattatcaaaaaggatcttcacctagatccttttaaattaaaaatgaagttttaaatcaatctaaagtatatatgagtaaacttggtctgacagttagaaaaactcatcgagcatcaaatgaaactgcaatttattcatatcaggattatcaataccatatttttgaaaaagccgtttctgtaatgaaggagaaaactcaccgaggcagttccataggatggcaagatcctggtatcggtctgcgattccgactcgtccaacatcaatacaacctattaatttcccctcgtcaaaaataaggttatcaagtgagaaatcaccatgagtgacgactgaatccggtgagaatggcaaaagtttatgcatttctttccagacttgttcaacaggccagccattacgctcgtcatcaaaatcactcgcatcaaccaaaccgttattcattcgtgattgcgcctgagcgagacgaaatacgcgatcgctgttaaaaggacaattacaaacaggaatcgaatgcaaccggcgcaggaacactgccagcgcatcaacaatattttcacctgaatcaggatattcttctaatacctggaatgctgttttcccagggatcgcagtggtgagtaaccatgcatcatcaggagtacggataaaatgcttgatggtcggaagaggcataaattccgtcagccagtttagtctgaccatctcatctgtaacatcattggcaacgctacctttgccatgtttcagaaacaactctggcgcatcgggcttcccatacaatcgatagattgtcgcacctgattgcccgacattatcgcgagcccatttatacccatataaatcagcatccatgttggaatttaatcgcggcctagagcaagacgtttcccgttgaatatggctcatactcttcctttttcaatattattgaagcatttatcagggttattgtctcatgagcggatacatatttgaatgtatttagaaaaataaacaaataggggttccgcgcacatttccccgaaaagtgccacctgacgtctaagaaaccattattatcatgacattaacctataaaaataggcgtatcacgaggc

SEQ ID NO: 39 - DNA, 4582 bp, Artificial Sequence
  pLMTB7388
tcgcgcgtttcggtgatgacggtgaaaacctctgacacatgcagctcccggagacggtcacagcttgtctgtaagcggatgccgggagcagacaagcccgtcagggcgcgtcagcgggtgttggcgggtgtcggggctggcttaactatgcggcatcagagcagattgtactgagagtgcaccatatgcggtgtgaaataccgcacagatgcgtaaggagaaaataccgcatcaggcgccattcgccattcaggctgcgcaactgttgggaagggcgatcggtgcgggcctcttcgctattacgccagctggcgaaagggggatgtgctgcaaggcgattaagttgggtaacgccagggttttcccagtcacgacgttgtaaaacgacggccagtgaattcgagctcggtacctcgcgaatgcatctacctgcaggttaattaatttgcaacagaagataaggtagacaatcctatttcactatatgctgcgactaaaaaaacaaatgaacttcaagcgtatgcttattcaaagatttacaatattccttcgacaggcttacgcttttttacagtttatggtcctgctgggcgcccagatatggcctattttggatttacagataaattgcgaagtggttccgatattgagatttataatcatggtaattgtaaacgagattttacttatatagatgatatcgttgaggggatagtaagggtcatgcaatcagctccgaagaaactagtgggatctgataatttaccgttagccccatataaagtgtacaatattgggaatagtaaacccgaaaatttgttagattttgtggatgttcttcaacaggagctaatcaaggcaggagttttgccggaaaattatgattttgatagtcataaaaaattagttcctatgcaaccaggcgatgttcctgttacttatgcagatacaagtgatttagagagagattttggttttaaaccaaaaacttctttacgagaaggtttgagaaagtttgcagagtggtataaagactactataatgtataacgagagtgttttgagaaaggaaaaaattatgaaaatagcagtagcaggtacaggatatgttggattatctattgcaatcttactggctcaacatcatcaagttgttgccgtagatatcattcctgagaaagttgagttaatcaataaaaagaagtcccctatccaagacgattatatagaaaaatatctcgcggaaaaagaattgaatctcgtagctacattgaatgcagaggaagcatatgagaatgcggattttatagttattgcggctccaactaattatgatccgaaaaaaaattttttcgatacatcttcagtcgaggctgtcattgaagcagttatgaaatataatcctgatgcaattataataattaaaagtactgttcctgttggatatacaaagtcagtacggaggaaatttcttacagacaatattatgtttagtcctgagtttttacgggagtcaaaagcgttatatgataacctatatccgagtcgaattattataggtacagataaagatgataaagatttggtaaagtctgctgaaatttttgtaaaaatgcttcaggaaggtgcagtgaaagaaaatattgaaacattgtatatggattttacagaagctgaagcagtaaaactttttgctaatacctatcttgccctccgggtttcctattttaacgagttagatacttattctgagatgaaaggactagatactcaagcgattattgatggagtttgtttagatccgagaataggttctcactacaataatccttcttttggttatgggggttactgtcttcctaaagataccaagcaacttcttgcaaattattctgacgttccacaagaaatgataacagctatagtacaaagtaatcggacaagaaaagattatattgcagatcgtattttagatcttgctggatcttatgtaggcaatgatttctataaaccagataaagaaaaagagattgttgtaggaatttatcgtttaacaatgaaaagtaattcagataattttagacaatcttctattcaaggtattatgaagcgtttgaaagcaaaaggtgttactattattatttacgaaccaactcttgaaagtggtactactttctatggtagtcaagtagttaatgattttgaaatatttaagaaatctagtcaagtgattgttgcaaatcgttttgatgagactttagaagatgtgaggggtaaagtttatactagggatatttttaagagagattaagcctcgagggccggcccgtacgcctcctcctccttaattaacctgcaggggatcccgggcccgtcgactgcagaggcctgcatgcaagcttggcgtaatcatggtcatagctgtttcctgtgtgaaattgttatccgctcacaattccacacaacatacgagccggaagcataaagtgtaaagcctggggtgcctaatgagtgagctaactcacattaattgcgttgcgctcactgcccgctttccagtcgggaaacctgtcgtgccagctgcattaatgaatcggccaacgcgcggggagaggcggtttgcgtattgggcgctcttccgcttcctcgctcactgactcgctgcgctcggtcgttcggctgcggcgagcggtatcagctcactcaaaggcggtaatacggttatccacagaatcaggggataacgcaggaaagaacatgtgagcaaaaggccagcaaaaggccaggaaccgtaaaaaggccgcgttgctggcgtttttccataggctccgcccccctgacgagcatcacaaaaatcgacgctcaagtcagaggtggcgaaacccgacaggactataaagataccaggcgtttccccctggaagctccctcgtgcgctctcctgttccgaccctgccgcttaccggatacctgtccgcctttctcccttcgggaagcgtggcgctttctcatagctcacgctgtaggtatctcagttcggtgtaggtcgttcgctccaagctgggctgtgtgcacgaaccccccgttcagcccgaccgctgcgccttatccggtaactatcgtcttgagtccaacccggtaagacacgacttatcgccactggcagcagccactggtaacaggattagcagagcgaggtatgtaggcggtgctacagagttcttgaagtggtggcctaactacggctacactagaagaacagtatttggtatctgcgctctgctgaagccagttaccttcggaaaaagagttggtagctcttgatccggcaaacaaaccaccgctggtagcggtggtttttttgtttgcaagcagcagattacgcgcagaaaaaaaggatctcaagaagatcctttgatcttttctacggggtctgacgctcagtggaacgaaaactcacgttaagggattttggtcatgagattatcaaaaaggatcttcacctagatccttttaaattaaaaatgaagttttaaatcaatctaaagtatatatgagtaaacttggtctgacagttagaaaaactcatcgagcatcaaatgaaactgcaatttattcatatcaggattatcaataccatatttttgaaaaagccgtttctgtaatgaaggagaaaactcaccgaggcagttccataggatggcaagatcctggtatcggtctgcgattccgactcgtccaacatcaatacaacctattaatttcccctcgtcaaaaataaggttatcaagtgagaaatcaccatgagtgacgactgaatccggtgagaatggcaaaagtttatgcatttctttccagacttgttcaacaggccagccattacgctcgtcatcaaaatcactcgcatcaaccaaaccgttattcattcgtgattgcgcctgagcgagacgaaatacgcgatcgctgttaaaaggacaattacaaacaggaatcgaatgcaaccggcgcaggaacactgccagcgcatcaacaatattttcacctgaatcaggatattcttctaatacctggaatgctgttttcccagggatcgcagtggtgagtaaccatgcatcatcaggagtacggataaaatgcttgatggtcggaagaggcataaattccgtcagccagtttagtctgaccatctcatctgtaacatcattggcaacgctacctttgccatgtttcagaaacaactctggcgcatcgggcttcccatacaatcgatagattgtcgcacctgattgcccgacattatcgcgagcccatttatacccatataaatcagcatccatgttggaatttaatcgcggcctagagcaagacgtttcccgttgaatatggctcatactcttcctttttcaatattattgaagcatttatcagggttattgtctcatgagcggatacatatttgaatgtatttagaaaaataaacaaataggggttccgcgcacatttccccgaaaagtgccacctgacgtctaagaaaccattattatcatgacattaacctataaaaataggcgtatcacgaggc

SEQ ID NO: 40 - DNA, 4582 bp, Artificial Sequence
  pLMTB7390
tcgcgcgtttcggtgatgacggtgaaaacctctgacacatgcagctcccggagacggtcacagcttgtctgtaagcggatgccgggagcagacaagcccgtcagggcgcgtcagcgggtgttggcgggtgtcggggctggcttaactatgcggcatcagagcagattgtactgagagtgcaccatatgcggtgtgaaataccgcacagatgcgtaaggagaaaataccgcatcaggcgccattcgccattcaggctgcgcaactgttgggaagggcgatcggtgcgggcctcttcgctattacgccagctggcgaaagggggatgtgctgcaaggcgattaagttgggtaacgccagggttttcccagtcacgacgttgtaaaacgacggccagtgaattcgagctcggtacctcgcgaatgcatctacctgcaggttaattaaacgaaccaactcttgaaagtggtactactttctatggtagtcaagtagttaatgattttgaaatatttaagaaatctagtcaagtgattgttgcaaatcgttttgatgagactttagaagatgtgaggggtaaagtttatactagggatatttttaagagagattaagcctcgagggccggcccgtacgcctcctcctcctttcttgttcctttcacgtcgccttctcggttgtagctggcagacgacgagtcttacttttacgtgtacttctctatagatgatgtatgatctctctgcatgcgtgttcgtgcatgtgtccgtgtgttgtgtacgcgtgcgtctcgcctcagctctccgcgtgaaagggtttgactgcccatgatgcgtgtgtatatccacgcgcaggcacgcacacacacacacacacacacacacacaggcacacacaggcacacaaacgcatctcaggccgagccgcatacgtctctcgcacggtctcgtttatttgatcatgtagttgagtattaaattgggaagacaaaaacataatagcacgaagagtcgggcacgaaaagcccgatctctctctctctctctcgtgcgcgcaggggcgtgtgggtgcacgacgacgaggacggaggggggaagggaggcataaacggatcgatcccccatcgcacatgcgggtacgagcattatctgctgtgtctggtcctttatcatatcgctacccgcccgccccccgcccccctcccccccccccccccgcggctcctgtcactgtcgttcctgcgactccccacacacccgcgcaacgctcatgtcacgaagagaaaagtagaaggcgtggcgatgcgttgcgcggccccctgtccgctggcatgcagacgtcgagccgtggaacggatggtagcgagagacaacgcggcgatgcaggaaaggagatttactgcaggacgtctacacacgcgcgcacaccactgcgaatggcaccgtgctgaggaaaattgggggggagggcgcacgggggcggggcaggaaacggttggatcagcagcactctcaacttgtgtccgtattgcgaaggagggagaggagcctgcccgtattatgggcgctgaaacgtcggaaccacctatgaatcccacttctgcgtcgcggaggcgtactgcttccgaccacctccgcagctcacgcgcgtcgagctccctccctttccccttctttccgttgtgtgtgtgtgtgtgtgtgtgtcttgtcacgatgcatggccatctctcctccaaccctccacgccttcctctcccccgcccatcaaacgcgctacggccacaaccatttcttcaagtatcacatccaccaccactcttacccacctaccctcttcgactctgacacagccactgacgccctctccgcctctctcgctcgctgcacattgactctccacagccccccctccctcgcacagccagccccacccacccacccacccacccaccgctctacacacctccacagcagccggatcctagtatgaagatttcggtgatccctgagcaggtggcggaaacattggatgctgagaaccatttcattgttcgtgaagtgttcgatgtgcacctatccgaccaaggctttgaactatctaccagaagtgtgagcccctaccggaaggattacatctcggatgatgactctgatgaagactctgcttgctatggcgcattcatcgaccaagagcttgtcgggaagattgaactcaactcaacatggaacgatctagcctctatcgaacacattgttgtgtcgcacacgcaccgaggcaaaggagtcgcgcacagtctcatcgaatttgcgaaaaagtgggcactaagcagacagctccttggcatacgttaattaacctgcaggggatcccgggcccgtcgactgcagaggcctgcatgcaagcttggcgtaatcatggtcatagctgtttcctgtgtgaaattgttatccgctcacaattccacacaacatacgagccggaagcataaagtgtaaagcctggggtgcctaatgagtgagctaactcacattaattgcgttgcgctcactgcccgctttccagtcgggaaacctgtcgtgccagctgcattaatgaatcggccaacgcgcggggagaggcggtttgcgtattgggcgctcttccgcttcctcgctcactgactcgctgcgctcggtcgttcggctgcggcgagcggtatcagctcactcaaaggcggtaatacggttatccacagaatcaggggataacgcaggaaagaacatgtgagcaaaaggccagcaaaaggccaggaaccgtaaaaaggccgcgttgctggcgtttttccataggctccgcccccctgacgagcatcacaaaaatcgacgctcaagtcagaggtggcgaaacccgacaggactataaagataccaggcgtttccccctggaagctccctcgtgcgctctcctgttccgaccctgccgcttaccggatacctgtccgcctttctcccttcgggaagcgtggcgctttctcatagctcacgctgtaggtatctcagttcggtgtaggtcgttcgctccaagctgggctgtgtgcacgaaccccccgttcagcccgaccgctgcgccttatccggtaactatcgtcttgagtccaacccggtaagacacgacttatcgccactggcagcagccactggtaacaggattagcagagcgaggtatgtaggcggtgctacagagttcttgaagtggtggcctaactacggctacactagaagaacagtatttggtatctgcgctctgctgaagccagttaccttcggaaaaagagttggtagctcttgatccggcaaacaaaccaccgctggtagcggtggtttttttgtttgcaagcagcagattacgcgcagaaaaaaaggatctcaagaagatcctttgatcttttctacggggtctgacgctcagtggaacgaaaactcacgttaagggattttggtcatgagattatcaaaaaggatcttcacctagatccttttaaattaaaaatgaagttttaaatcaatctaaagtatatatgagtaaacttggtctgacagttagaaaaactcatcgagcatcaaatgaaactgcaatttattcatatcaggattatcaataccatatttttgaaaaagccgtttctgtaatgaaggagaaaactcaccgaggcagttccataggatggcaagatcctggtatcggtctgcgattccgactcgtccaacatcaatacaacctattaatttcccctcgtcaaaaataaggttatcaagtgagaaatcaccatgagtgacgactgaatccggtgagaatggcaaaagtttatgcatttctttccagacttgttcaacaggccagccattacgctcgtcatcaaaatcactcgcatcaaccaaaccgttattcattcgtgattgcgcctgagcgagacgaaatacgcgatcgctgttaaaaggacaattacaaacaggaatcgaatgcaaccggcgcaggaacactgccagcgcatcaacaatattttcacctgaatcaggatattcttctaatacctggaatgctgttttcccagggatcgcagtggtgagtaaccatgcatcatcaggagtacggataaaatgcttgatggtcggaagaggcataaattccgtcagccagtttagtctgaccatctcatctgtaacatcattggcaacgctacctttgccatgtttcagaaacaactctggcgcatcgggcttcccatacaatcgatagattgtcgcacctgattgcccgacattatcgcgagcccatttatacccatataaatcagcatccatgttggaatttaatcgcggcctagagcaagacgtttcccgttgaatatggctcatactcttcctttttcaatattattgaagcatttatcagggttattgtctcatgagcggatacatatttgaatgtatttagaaaaataaacaaataggggttccgcgcacatttccccgaaaagtgccacctgacgtctaagaaaccattattatcatgacattaacctataaaaataggcgtatcacgaggc

SEQ ID NO: 41 - DNA, 4012 bp, Artificial Sequence
  pLMTB7391
tcgcgcgtttcggtgatgacggtgaaaacctctgacacatgcagctcccggagacggtcacagcttgtctgtaagcggatgccgggagcagacaagcccgtcagggcgcgtcagcgggtgttggcgggtgtcggggctggcttaactatgcggcatcagagcagattgtactgagagtgcaccatatgcggtgtgaaataccgcacagatgcgtaaggagaaaataccgcatcaggcgccattcgccattcaggctgcgcaactgttgggaagggcgatcggtgcgggcctcttcgctattacgccagctggcgaaagggggatgtgctgcaaggcgattaagttgggtaacgccagggttttcccagtcacgacgttgtaaaacgacggccagtgaattcgagctcggtacctcgcgaatgcatctacctgcaggttaattaatctgatgaagactctgcttgctatggcgcattcatcgaccaagagcttgtcgggaagattgaactcaactcaacatggaacgatctagcctctatcgaacacattgttgtgtcgcacacgcaccgaggcaaaggagtcgcgcacagtctcatcgaatttgcgaaaaagtgggcactaagcagacagctccttggcatacgattagagacacaaacgaacaatgtacctgcctgcaatttgtacgcaaaatgtggctttactctcggcggcattgacctgttcacgtataaaactagacctcaagtctcgaacgaaacagcgatgtactggtactggttctcgggagcacaggatgacgcctaactagcctcggagatccactagttctagttctaggggccgaattcagatcctcgtgtgagcgttcgcggaatcggtcgctcgtgtttatgcccgtcttggtgttgtgctcgcaaggcggtgcagcaggataccgtcgccctcctctctccttgcttctctgttcttcaattcgcgatctcacagaggccggctgtgcacgcccttcctcaccctccttttcccacctctcggccaccggtcggctccgttccgtctgccgtcgagaagggacgggcatgtgcagctcctccctttctctcgcgcgcgcatcttctcttgcttgtggcactcacgctcatgcgtcaaggcggccccacgccgagcccctgcgctcccttccctcttgcgcatccgtagcgcggatgccgtcgatgcgcaaggccggcatgaaggagcgcgtgccctcaagagggcacactatcatgccctacgtgggccacgcagcgatgaggccggcttcggcggagatgcgtcacgcacgtgccagatgatgcgctacgccttccttgacttgcgcccccctctcttcctccgtctctcactctctctctctcacacacacacacacacacacacacacacaacgtacgggatctgttttggcggatgagagaagaaattcgtcgcccgccataaactgccaggcatcaaattaagcagaaggccatcctgacggatggcctttttgcgtttctacaaactcttcctgtggatccgagctccttaagctgatagctagctcagtcctagggattatgctagctactagagattaggaggactagtcctgaggtacgtaggcgcgccgtgcactgttttggcggatgagagaagaaattcgtcgcccgccataaactgccaggcatcaaattaagcagaaggccatcctgacggatggcctttttgcgtttctacaaactcttcctgtttaattaacctgcaggggatcccgggcccgtcgactgcagaggcctgcatgcaagcttggcgtaatcatggtcatagctgtttcctgtgtgaaattgttatccgctcacaattccacacaacatacgagccggaagcataaagtgtaaagcctggggtgcctaatgagtgagctaactcacattaattgcgttgcgctcactgcccgctttccagtcgggaaacctgtcgtgccagctgcattaatgaatcggccaacgcgcggggagaggcggtttgcgtattgggcgctcttccgcttcctcgctcactgactcgctgcgctcggtcgttcggctgcggcgagcggtatcagctcactcaaaggcggtaatacggttatccacagaatcaggggataacgcaggaaagaacatgtgagcaaaaggccagcaaaaggccaggaaccgtaaaaaggccgcgttgctggcgtttttccataggctccgcccccctgacgagcatcacaaaaatcgacgctcaagtcagaggtggcgaaacccgacaggactataaagataccaggcgtttccccctggaagctccctcgtgcgctctcctgttccgaccctgccgcttaccggatacctgtccgcctttctcccttcgggaagcgtggcgctttctcatagctcacgctgtaggtatctcagttcggtgtaggtcgttcgctccaagctgggctgtgtgcacgaaccccccgttcagcccgaccgctgcgccttatccggtaactatcgtcttgagtccaacccggtaagacacgacttatcgccactggcagcagccactggtaacaggattagcagagcgaggtatgtaggcggtgctacagagttcttgaagtggtggcctaactacggctacactagaagaacagtatttggtatctgcgctctgctgaagccagttaccttcggaaaaagagttggtagctcttgatccggcaaacaaaccaccgctggtagcggtggtttttttgtttgcaagcagcagattacgcgcagaaaaaaaggatctcaagaagatcctttgatcttttctacggggtctgacgctcagtggaacgaaaactcacgttaagggattttggtcatgagattatcaaaaaggatcttcacctagatccttttaaattaaaaatgaagttttaaatcaatctaaagtatatatgagtaaacttggtctgacagttagaaaaactcatcgagcatcaaatgaaactgcaatttattcatatcaggattatcaataccatatttttgaaaaagccgtttctgtaatgaaggagaaaactcaccgaggcagttccataggatggcaagatcctggtatcggtctgcgattccgactcgtccaacatcaatacaacctattaatttcccctcgtcaaaaataaggttatcaagtgagaaatcaccatgagtgacgactgaatccggtgagaatggcaaaagtttatgcatttctttccagacttgttcaacaggccagccattacgctcgtcatcaaaatcactcgcatcaaccaaaccgttattcattcgtgattgcgcctgagcgagacgaaatacgcgatcgctgttaaaaggacaattacaaacaggaatcgaatgcaaccggcgcaggaacactgccagcgcatcaacaatattttcacctgaatcaggatattcttctaatacctggaatgctgttttcccagggatcgcagtggtgagtaaccatgcatcatcaggagtacggataaaatgcttgatggtcggaagaggcataaattccgtcagccagtttagtctgaccatctcatctgtaacatcattggcaacgctacctttgccatgtttcagaaacaactctggcgcatcgggcttcccatacaatcgatagattgtcgcacctgattgcccgacattatcgcgagcccatttatacccatataaatcagcatccatgttggaatttaatcgcggcctagagcaagacgtttcccgttgaatatggctcatactcttcctttttcaatattattgaagcatttatcagggttattgtctcatgagcggatacatatttgaatgtatttagaaaaataaacaaataggggttccgcgcacatttccccgaaaagtgccacctgacgtctaagaaaccattattatcatgacattaacctataaaaataggcgtatcacgaggc

SEQ ID NO: 42 - DNA, 4637 bp, Artificial Sequence
  pLMTB7392
tcgcgcgtttcggtgatgacggtgaaaacctctgacacatgcagctcccggagacggtcacagcttgtctgtaagcggatgccgggagcagacaagcccgtcagggcgcgtcagcgggtgttggcgggtgtcggggctggcttaactatgcggcatcagagcagattgtactgagagtgcaccatatgcggtgtgaaataccgcacagatgcgtaaggagaaaataccgcatcaggcgccattcgccattcaggctgcgcaactgttgggaagggcgatcggtgcgggcctcttcgctattacgccagctggcgaaagggggatgtgctgcaaggcgattaagttgggtaacgccagggttttcccagtcacgacgttgtaaaacgacggccagtgaattcgagctcggtacctcgcgaatgcatctacctgcaggttaattaacagcaactgaataccagaaagaaaatcactttacctttctgacatcagaagggcagaaatttgccgttgaacacctggtcaatacgcgttttggtgagcagcaatattgcgcttcgatgacgcttggcgttgagattgatacctctgctgcacaaaaggcaatcgacgagctggaccagcgcattcgtgacaccgtctcccaccaggtgtacgtacaccaccatcaccaccactaggcggccgccctcctcctcctttcttgttcctttcacgtcgccttctcggttgtagctggcagacgacgagtcttacttttacgtgtacttctctatagatgatgtatgatctctctgcatgcgtgttcgtgcatgtgtccgtgtgttgtgtacgcgtgcgtctcgcctcagctctccgcgtgaaagggtttgactgcccatgatgcgtgtgtatatccacgcgcaggcacgcacacacacacacacacacacacacacaggcacacacaggcacacaaacgcatctcaggccgagccgcatacgtctctcgcacggtctcgtttatttgatcatgtagttgagtattaaattgggaagacaaaaacataatagcacgaagagtcgggcacgaaaagcccgatctctctctctctctctcgtgcgcgcaggggcgtgtgggtgcacgacgacgaggacggaggggggaagggaggcataaacggatcgatcccccatcgcacatgcgggtacgagcattatctgctgtgtctggtcctttatcatatcgctacccgcccgccccccgcccccctcccccccccccccccgcggctcctgtcactgtcgttcctgcgactccccacacacccgcgcaacgctcatgtcacgaagagaaaagtagaaggcgtggcgatgcgttgcgcggccccctgtccgctggcatgcagacgtcgagccgtggaacggatggtagcgagagacaacgcggcgatgcaggaaaggagatttactgcaggacgtctacacacgcgcgcacaccactgcgaatggcaccgtgctgaggaaaattgggggggagggcgcacgggggcggggcaggaaacggttggatcagcagcactctcaacttgtgtccgtattgcgaaggagggagaggagcctgcccgtattatgggcgctgaaacgtcggaaccacctatgaatcccacttctgcgtcgcggaggcgtactgcttccgaccacctccgcagctcacgcgcgtcgagctccctccctttccccttctttccgttgtgtgtgtgtgtgtgtgtgtgtcttgtcacgatgcatggccatctctcctccaaccctccacgccttcctctcccccgcccatcaaacgcgctacggccacaaccatttcttcaagtatcacatccaccaccactcttacccacctaccctcttcgactctgacacagccactgacgccctctccgcctctctcgctcgctgcacattgactctccacagccccccctccctcgcacagccagccccacccacccacccacccacccaccgctctacacacctccacagcagccggatcctagtatgaagatttcggtgatccctgagcaggtggcggaaacattggatgctgagaaccatttcattgttcgtgaagtgttcgatgtgcacctatccgaccaaggctttgaactatctaccagaagtgtgagcccctaccggaaggattacatctcggatgatgactctgatgaagactctgcttgctatggcgcattcatcgaccaagagcttgtcgggaagattgaactcaactcaacatggaacgatctagcctctatcgaacacattgttgtgtcgcacacgcaccgaggcaaaggagtcgcgcacagtctcatcgaatttgcgaaaaagtgggcactaagcagacagctccttggcatacgttaattaacctgcaggggatcccgggcccgtcgactgcagaggcctgcatgcaagcttggcgtaatcatggtcatagctgtttcctgtgtgaaattgttatccgctcacaattccacacaacatacgagccggaagcataaagtgtaaagcctggggtgcctaatgagtgagctaactcacattaattgcgttgcgctcactgcccgctttccagtcgggaaacctgtcgtgccagctgcattaatgaatcggccaacgcgcggggagaggcggtttgcgtattgggcgctcttccgcttcctcgctcactgactcgctgcgctcggtcgttcggctgcggcgagcggtatcagctcactcaaaggcggtaatacggttatccacagaatcaggggataacgcaggaaagaacatgtgagcaaaaggccagcaaaaggccaggaaccgtaaaaaggccgcgttgctggcgtttttccataggctccgcccccctgacgagcatcacaaaaatcgacgctcaagtcagaggtggcgaaacccgacaggactataaagataccaggcgtttccccctggaagctccctcgtgcgctctcctgttccgaccctgccgcttaccggatacctgtccgcctttctcccttcgggaagcgtggcgctttctcatagctcacgctgtaggtatctcagttcggtgtaggtcgttcgctccaagctgggctgtgtgcacgaaccccccgttcagcccgaccgctgcgccttatccggtaactatcgtcttgagtccaacccggtaagacacgacttatcgccactggcagcagccactggtaacaggattagcagagcgaggtatgtaggcggtgctacagagttcttgaagtggtggcctaactacggctacactagaagaacagtatttggtatctgcgctctgctgaagccagttaccttcggaaaaagagttggtagctcttgatccggcaaacaaaccaccgctggtagcggtggtttttttgtttgcaagcagcagattacgcgcagaaaaaaaggatctcaagaagatcctttgatcttttctacggggtctgacgctcagtggaacgaaaactcacgttaagggattttggtcatgagattatcaaaaaggatcttcacctagatccttttaaattaaaaatgaagttttaaatcaatctaaagtatatatgagtaaacttggtctgacagttagaaaaactcatcgagcatcaaatgaaactgcaatttattcatatcaggattatcaataccatatttttgaaaaagccgtttctgtaatgaaggagaaaactcaccgaggcagttccataggatggcaagatcctggtatcggtctgcgattccgactcgtccaacatcaatacaacctattaatttcccctcgtcaaaaataaggttatcaagtgagaaatcaccatgagtgacgactgaatccggtgagaatggcaaaagtttatgcatttctttccagacttgttcaacaggccagccattacgctcgtcatcaaaatcactcgcatcaaccaaaccgttattcattcgtgattgcgcctgagcgagacgaaatacgcgatcgctgttaaaaggacaattacaaacaggaatcgaatgcaaccggcgcaggaacactgccagcgcatcaacaatattttcacctgaatcaggatattcttctaatacctggaatgctgttttcccagggatcgcagtggtgagtaaccatgcatcatcaggagtacggataaaatgcttgatggtcggaagaggcataaattccgtcagccagtttagtctgaccatctcatctgtaacatcattggcaacgctacctttgccatgtttcagaaacaactctggcgcatcgggcttcccatacaatcgatagattgtcgcacctgattgcccgacattatcgcgagcccatttatacccatataaatcagcatccatgttggaatttaatcgcggcctagagcaagacgtttcccgttgaatatggctcatactcttcctttttcaatattattgaagcatttatcagggttattgtctcatgagcggatacatatttgaatgtatttagaaaaataaacaaataggggttccgcgcacatttccccgaaaagtgccacctgacgtctaagaaaccattattatcatgacattaacctataaaaataggcgtatcacgaggc

SEQ ID NO: 43 - DNA, 3883 bp, Artificial Sequence
  pLMTB7393
tcgcgcgtttcggtgatgacggtgaaaacctctgacacatgcagctcccggagacggtcacagcttgtctgtaagcggatgccgggagcagacaagcccgtcagggcgcgtcagcgggtgttggcgggtgtcggggctggcttaactatgcggcatcagagcagattgtactgagagtgcaccatatgcggtgtgaaataccgcacagatgcgtaaggagaaaataccgcatcaggcgccattcgccattcaggctgcgcaactgttgggaagggcgatcggtgcgggcctcttcgctattacgccagctggcgaaagggggatgtgctgcaaggcgattaagttgggtaacgccagggttttcccagtcacgacgttgtaaaacgacggccagtgaattcgagctcggtacctcgcgaatgcatctacctgcaggttaattaatctgatgaagactctgcttgctatggcgcattcatcgaccaagagcttgtcgggaagattgaactcaactcaacatggaacgatctagcctctatcgaacacattgttgtgtcgcacacgcaccgaggcaaaggagtcgcgcacagtctcatcgaatttgcgaaaaagtgggcactaagcagacagctccttggcatacgattagagacacaaacgaacaatgtacctgcctgcaatttgtacgcaaaatgtggctttactctcggcggcattgacctgttcacgtataaaactagacctcaagtctcgaacgaaacagcgatgtactggtactggttctcgggagcacaggatgacgcctaactagcctcggagatccactagttctagttctaggggccgaattcagatcctcgtgtgagcgttcgcggaatcggtcgctcgtgtttatgcccgtcttggtgttgtgctcgcaaggcggtgcagcaggataccgtcgccctcctctctccttgcttctctgttcttcaattcgcgatctcacagaggccggctgtgcacgcccttcctcaccctccttttcccacctctcggccaccggtcggctccgttccgtctgccgtcgagaagggacgggcatgtgcagctcctccctttctctcgcgcgcgcatcttctcttgcttgtggcactcacgctcatgcgtcaaggcggccccacgccgagcccctgcgctcccttccctcttgcgcatccgtagcgcggatgccgtcgatgcgcaaggccggcatgaaggagcgcgtgccctcaagagggcacactatcatgccctacgtgggccacgcagcgatgaggccggcttcggcggagatgcgtcacgcacgtgccagatgatgcgctacgccttccttgacttgcgcccccctctcttcctccgtctctcactctctctctctcacacacacacacacacacacacacacacaatacgtacaccaggtgcttattcgcaatggagtgtcattcatcaaggacgccgctatcgcaaatggtgctatccacgcagcggcaatcgaaacacctcagccggtgaccaatatctacaacatcagccttggtatccagcgtgatgagccagcgcagaacaaggtaaccgtcagtgccgataagttcaaagttaaacctggtgttgataccaacatttaattaacctgcaggggatcccgggcccgtcgactgcagaggcctgcatgcaagcttggcgtaatcatggtcatagctgtttcctgtgtgaaattgttatccgctcacaattccacacaacatacgagccggaagcataaagtgtaaagcctggggtgcctaatgagtgagctaactcacattaattgcgttgcgctcactgcccgctttccagtcgggaaacctgtcgtgccagctgcattaatgaatcggccaacgcgcggggagaggcggtttgcgtattgggcgctcttccgcttcctcgctcactgactcgctgcgctcggtcgttcggctgcggcgagcggtatcagctcactcaaaggcggtaatacggttatccacagaatcaggggataacgcaggaaagaacatgtgagcaaaaggccagcaaaaggccaggaaccgtaaaaaggccgcgttgctggcgtttttccataggctccgcccccctgacgagcatcacaaaaatcgacgctcaagtcagaggtggcgaaacccgacaggactataaagataccaggcgtttccccctggaagctccctcgtgcgctctcctgttccgaccctgccgcttaccggatacctgtccgcctttctcccttcgggaagcgtggcgctttctcatagctcacgctgtaggtatctcagttcggtgtaggtcgttcgctccaagctgggctgtgtgcacgaaccccccgttcagcccgaccgctgcgccttatccggtaactatcgtcttgagtccaacccggtaagacacgacttatcgccactggcagcagccactggtaacaggattagcagagcgaggtatgtaggcggtgctacagagttcttgaagtggtggcctaactacggctacactagaagaacagtatttggtatctgcgctctgctgaagccagttaccttcggaaaaagagttggtagctcttgatccggcaaacaaaccaccgctggtagcggtggtttttttgtttgcaagcagcagattacgcgcagaaaaaaaggatctcaagaagatcctttgatcttttctacggggtctgacgctcagtggaacgaaaactcacgttaagggattttggtcatgagattatcaaaaaggatcttcacctagatccttttaaattaaaaatgaagttttaaatcaatctaaagtatatatgagtaaacttggtctgacagttagaaaaactcatcgagcatcaaatgaaactgcaatttattcatatcaggattatcaataccatatttttgaaaaagccgtttctgtaatgaaggagaaaactcaccgaggcagttccataggatggcaagatcctggtatcggtctgcgattccgactcgtccaacatcaatacaacctattaatttcccctcgtcaaaaataaggttatcaagtgagaaatcaccatgagtgacgactgaatccggtgagaatggcaaaagtttatgcatttctttccagacttgttcaacaggccagccattacgctcgtcatcaaaatcactcgcatcaaccaaaccgttattcattcgtgattgcgcctgagcgagacgaaatacgcgatcgctgttaaaaggacaattacaaacaggaatcgaatgcaaccggcgcaggaacactgccagcgcatcaacaatattttcacctgaatcaggatattcttctaatacctggaatgctgttttcccagggatcgcagtggtgagtaaccatgcatcatcaggagtacggataaaatgcttgatggtcggaagaggcataaattccgtcagccagtttagtctgaccatctcatctgtaacatcattggcaacgctacctttgccatgtttcagaaacaactctggcgcatcgggcttcccatacaatcgatagattgtcgcacctgattgcccgacattatcgcgagcccatttatacccatataaatcagcatccatgttggaatttaatcgcggcctagagcaagacgtttcccgttgaatatggctcatactcttcctttttcaatattattgaagcatttatcagggttattgtctcatgagcggatacatatttgaatgtatttagaaaaataaacaaataggggttccgcgcacatttccccgaaaagtgccacctgacgtctaagaaaccattattatcatgacattaacctataaaaataggcgtatcacgaggc

SEQ ID NO: 44 - DNA, 3526 bp, Artificial Sequence
  pLMTB8080
tcgcgcgtttcggtgatgacggtgaaaacctctgacacatgcagctcccggagacggtcacagcttgtctgtaagcggatgccgggagcagacaagcccgtcagggcgcgtcagcgggtgttggcgggtgtcggggctggcttaactatgcggcatcagagcagattgtactgagagtgcaccatatgcggtgtgaaataccgcacagatgcgtaaggagaaaataccgcatcaggcgccattcgccattcaggctgcgcaactgttgggaagggcgatcggtgcgggcctcttcgctattacgccagctggcgaaagggggatgtgctgcaaggcgattaagttgggtaacgccagggttttcccagtcacgacgttgtaaaacgacggccagtgaattgacgcgtattgggatatttaaattccgccacagccgcgacaagaagaacgagccgaacccgcagcgcttcgaccgcatcgcgcacacgaaggagacgatgctgagcgacggcctgaacagcctgacgtaccaggtgctggacgtgcagcgctacccgctgtacacgcagatcacggtggacatcggcacgccgagctggtcccacccgcagttcgagaagtaaatgctcctggctgccggttgcaagcacgtgtttcttccatcttgccatgcgaagcccgcgcggtatcttctcagcgtgccctgtgtgtcgtgttcgtaagttttgttttccttttcgatggttctcatttccttctttctaacgacgctctaccaaacctgtacacgtactgcaagcgctatcgtggaggcagcaggggcaggtgagagggagccgcggacggcgtcggcggaagcgttaatcctgcttccgtactcgtcgggctcatcatcgtcgcgtatcccgatgagtcgtcccaaactcccgctctgtgccagagagtggactgccctgcgcaccggtgcatcggtgctctgcgcggcattggcattcttgattcgtgtggcggtgcttgtcgaccacgctctccgcacctctatcctctccttggcgctctcccgatgtggcgcgagccggcaggtctcaagaggcgcatgtgaatgtttgcctgcagggagtacactaaattacttttctctgtctctctctttctctgactccctttggcctcccttttcgaaactccccatgctgccattgcggcgaccctccttgtgggatgtaccgacaccacaaccacacgacactgcatcctccctcgtctactcctacctcctcactgatgcgtgtgcagttaactggaaaatttaaatatcccaatggcgcgccgagcttggctcgagcatggtcatagctgtttcctgtgtgaaattgttatccgctcacaattccacacaacatacgagccggaagcataaagtgtaaagcctggggtgcctaatgagtgagctaactcacattaattgcgttgcgctcactgcccgctttccagtcgggaaacctgtcgtgccagctgcattaatgaatcggccaacgcgcggggagaggcggtttgcgtattgggcgctcttccgcttcctcgctcactgactcgctgcgctcggtcgttcggctgcggcgagcggtatcagctcactcaaaggcggtaatacggttatccacagaatcaggggataacgcaggaaagaacatgtgagcaaaaggccagcaaaaggccaggaaccgtaaaaaggccgcgttgctggcgtttttccataggctccgcccccctgacgagcatcacaaaaatcgacgctcaagtcagaggtggcgaaacccgacaggactataaagataccaggcgtttccccctggaagctccctcgtgcgctctcctgttccgaccctgccgcttaccggatacctgtccgcctttctcccttcgggaagcgtggcgctttctcatagctcacgctgtaggtatctcagttcggtgtaggtcgttcgctccaagctgggctgtgtgcacgaaccccccgttcagcccgaccgctgcgccttatccggtaactatcgtcttgagtccaacccggtaagacacgacttatcgccactggcagcagccactggtaacaggattagcagagcgaggtatgtaggcggtgctacagagttcttgaagtggtggcctaactacggctacactagaagaacagtatttggtatctgcgctctgctgaagccagttaccttcggaaaaagagttggtagctcttgatccggcaaacaaaccaccgctggtagcggtggtttttttgtttgcaagcagcagattacgcgcagaaaaaaaggatctcaagaagatcctttgatcttttctacggggtctgacgctcagtggaacgaaaactcacgttaagggattttggtcatgagattatcaaaaaggatcttcacctagatccttttaaattaaaaatgaagttttaaatcaatctaaagtatatatgagtaaacttggtctgacagttagaaaaactcatcgagcatcaaatgaaactgcaatttattcatatcaggattatcaataccatatttttgaaaaagccgtttctgtaatgaaggagaaaactcaccgaggcagttccataggatggcaagatcctggtatcggtctgcgattccgactcgtccaacatcaatacaacctattaatttcccctcgtcaaaaataaggttatcaagtgagaaatcaccatgagtgacgactgaatccggtgagaatggcaaaagtttatgcatttctttccagacttgttcaacaggccagccattacgctcgtcatcaaaatcactcgcatcaaccaaaccgttattcattcgtgattgcgcctgagcgagacgaaatacgcgatcgctgttaaaaggacaattacaaacaggaatcgaatgcaaccggcgcaggaacactgccagcgcatcaacaatattttcacctgaatcaggatattcttctaatacctggaatgctgttttcccagggatcgcagtggtgagtaaccatgcatcatcaggagtacggataaaatgcttgatggtcggaagaggcataaattccgtcagccagtttagtctgaccatctcatctgtaacatcattggcaacgctacctttgccatgtttcagaaacaactctggcgcatcgggcttcccatacaatcgatagattgtcgcacctgattgcccgacattatcgcgagcccatttatacccatataaatcagcatccatgttggaatttaatcgcggcctagagcaagacgtttcccgttgaatatggctcatactcttcctttttcaatattattgaagcatttatcagggttattgtctcatgagcggatacatatttgaatgtatttagaaaaataaacaaataggggttccgcgcacatttccccgaaaagtgccacctgacgtctaagaaaccattattatcatgacattaacctataaaaataggcgtatcacgaggccctttcgtc

SEQ ID NO: 45 - DNA, 4282 bp, Artificial Sequence
  pLMTB8081
tcgcgcgtttcggtgatgacggtgaaaacctctgacacatgcagctcccggagacggtcacagcttgtctgtaagcggatgccgggagcagacaagcccgtcagggcgcgtcagcgggtgttggcgggtgtcggggctggcttaactatgcggcatcagagcagattgtactgagagtgcaccatatgcggtgtgaaataccgcacagatgcgtaaggagaaaataccgcatcaggcgccattcgccattcaggctgcgcaactgttgggaagggcgatcggtgcgggcctcttcgctattacgccagctggcgaaagggggatgtgctgcaaggcgattaagttgggtaacgccagggttttcccagtcacgacgttgtaaaacgacggccagtgaattgacgcgtattgggatggtaccatttaaattgcctgcagggagtacactaaattacttttctctgtctctctctttctctgactccctttggcctcccttttcgaaactccccatgctgccattgcggcgaccctccttgtgggatgtaccgacaccacaaccacacgacactgcatcctccctcgtctactcctacctcctcactgatgcgtgtgcagttaactggaaaatgctgaagaagcagtccgccggcctggtcctgtggggcgccatcctgttcgtcgcctggaacgccctgctgctgctgttcttctggacccggcccgcccccggccggcccccctccgtctccgccctggacggcgaccccgcctccctgacccgggaggtcatccggctggcccaggacgccgaggtcgagctggagcggcagcggggcctgctgcagcagatcggcgacgccctgtcctcccagcggggccgggtccccaccgccgccccccccgcccagccccgggtccccgtcacccccgcccccgccgtcatccccatcctggtcatcgcctgcgaccggtccaccgtccggcggtgcctggacaagctgctgcactatcggccctccgccgagctgttccccatcatcgtctcccaggactgcggccacgaggagaccgcccaggccatcgcctcctatggctccgccgtcacccacatccggcagcccgacctgtcctccatcgccgtcccccccgaccaccggaagttccagggctattataagatcgcccggcactatcggtgggccctgggccaggtcttccggcagttccggttccccgccgccgtcgtcgtcgaggacgacctggaggtcgcccccgacttcttcgagtatttccgggccacctatcccctgctgaaggccgacccctccctgtggtgcgtctccgcctggaacgacaacggcaaggagcagatggtcgacgcctcccggcccgagctgctgtatcggaccgacttcttccccggcctgggctggctgctgctggccgagctgtgggccgagctggagcccaagtggcccaaggccttctgggacgactggatgcggcggcccgagcagcggcagggccgggcctgcatccggcccgaaatttctcggaccatgaccttcggccggaagggcgtctcccacggccagttcttcgaccagcacctgaagttcatcaagctgaaccagcagttcgtccacttcacccagctggacctgtcctatctgcagcgggaggcctatgaccgggacttcctggcccgggtctatggcgccccccagctgcaggtcgagaaggtccggaccaacgaccggaaggagctgggcgaggtccgggtccagtataccggccgggactccttcaaggccttcgccaaggccctgggcgtcatggacgacctgaagtccggcgtcccccgggccggctatcggggcatcgtcaccttccagttccggggccggcgggtccacctggccccccccctgacctgggagggctatgacccctcctggaacgcgggagcgtatccttatgacgtccctgattacgcatatccttatgacgtccctgattacgcatatccttatgacgtccctgattacgcataaatttaaatggtaccatcccaatggcgcgccgagcttggctcgagcatggtcatagctgtttcctgtgtgaaattgttatccgctcacaattccacacaacatacgagccggaagcataaagtgtaaagcctggggtgcctaatgagtgagctaactcacattaattgcgttgcgctcactgcccgctttccagtcgggaaacctgtcgtgccagctgcattaatgaatcggccaacgcgcggggagaggcggtttgcgtattgggcgctcttccgcttcctcgctcactgactcgctgcgctcggtcgttcggctgcggcgagcggtatcagctcactcaaaggcggtaatacggttatccacagaatcaggggataacgcaggaaagaacatgtgagcaaaaggccagcaaaaggccaggaaccgtaaaaaggccgcgttgctggcgtttttccataggctccgcccccctgacgagcatcacaaaaatcgacgctcaagtcagaggtggcgaaacccgacaggactataaagataccaggcgtttccccctggaagctccctcgtgcgctctcctgttccgaccctgccgcttaccggatacctgtccgcctttctcccttcgggaagcgtggcgctttctcatagctcacgctgtaggtatctcagttcggtgtaggtcgttcgctccaagctgggctgtgtgcacgaaccccccgttcagcccgaccgctgcgccttatccggtaactatcgtcttgagtccaacccggtaagacacgacttatcgccactggcagcagccactggtaacaggattagcagagcgaggtatgtaggcggtgctacagagttcttgaagtggtggcctaactacggctacactagaagaacagtatttggtatctgcgctctgctgaagccagttaccttcggaaaaagagttggtagctcttgatccggcaaacaaaccaccgctggtagcggtggtttttttgtttgcaagcagcagattacgcgcagaaaaaaaggatctcaagaagatcctttgatcttttctacggggtctgacgctcagtggaacgaaaactcacgttaagggattttggtcatgagattatcaaaaaggatcttcacctagatccttttaaattaaaaatgaagttttaaatcaatctaaagtatatatgagtaaacttggtctgacagttagaaaaactcatcgagcatcaaatgaaactgcaatttattcatatcaggattatcaataccatatttttgaaaaagccgtttctgtaatgaaggagaaaactcaccgaggcagttccataggatggcaagatcctggtatcggtctgcgattccgactcgtccaacatcaatacaacctattaatttcccctcgtcaaaaataaggttatcaagtgagaaatcaccatgagtgacgactgaatccggtgagaatggcaaaagtttatgcatttctttccagacttgttcaacaggccagccattacgctcgtcatcaaaatcactcgcatcaaccaaaccgttattcattcgtgattgcgcctgagcgagacgaaatacgcgatcgctgttaaaaggacaattacaaacaggaatcgaatgcaaccggcgcaggaacactgccagcgcatcaacaatattttcacctgaatcaggatattcttctaatacctggaatgctgttttcccagggatcgcagtggtgagtaaccatgcatcatcaggagtacggataaaatgcttgatggtcggaagaggcataaattccgtcagccagtttagtctgaccatctcatctgtaacatcattggcaacgctacctttgccatgtttcagaaacaactctggcgcatcgggcttcccatacaatcgatagattgtcgcacctgattgcccgacattatcgcgagcccatttatacccatataaatcagcatccatgttggaatttaatcgcggcctagagcaagacgtttcccgttgaatatggctcatactcttcctttttcaatattattgaagcatttatcagggttattgtctcatgagcggatacatatttgaatgtatttagaaaaataaacaaataggggttccgcgcacatttccccgaaaagtgccacctgacgtctaagaaaccattattatcatgacattaacctataaaaataggcgtatcacgaggccctttcgtc

SEQ ID NO: 46 - DNA, 3708 bp, Artificial Sequence
  pLMTB8082
tcgcgcgtttcggtgatgacggtgaaaacctctgacacatgcagctcccggagacggtcacagcttgtctgtaagcggatgccgggagcagacaagcccgtcagggcgcgtcagcgggtgttggcgggtgtcggggctggcttaactatgcggcatcagagcagattgtactgagagtgcaccatatgcggtgtgaaataccgcacagatgcgtaaggagaaaataccgcatcaggcgccattcgccattcaggctgcgcaactgttgggaagggcgatcggtgcgggcctcttcgctattacgccagctggcgaaagggggatgtgctgcaaggcgattaagttgggtaacgccagggttttcccagtcacgacgttgtaaaacgacggccagtgaattgacgcgtattgggatggtaccatttaaatgcgtcccccgggccggctatcggggcatcgtcaccttccagttccggggccggcgggtccacctggccccccccctgacctgggagggctatgacccctcctggaacgcgggagcgtatccttatgacgtccctgattacgcatatccttatgacgtccctgattacgcatatccttatgacgtccctgattacgcataagggaaggataatgtgaacggacaacttctctgtcctttttcgttttaatttgtgattgtttcccgaagaagaaaagcaacaaaaccgaaaggggaaggagcgatgtgcgctcggcagaatagcctgtgcaaagttggcggcagcgcacgtgcgcacctggagatggcaacagcggcggcagtatgcacgcatgcacacacctggcagcgccagagatggaaagggacgaggatagagagggtaaagtgtcggaggagaacaagcacataaagggaggggcgaggtcgtgacggcgcgcgtgcttgttttgcccccccccctttcctgtggttttgctccgacctctctcttcctgtgtgttcccaccctctctctggatgcatatctgcgcgtgttttgcataggcacacacgcgacccgcgctgttgctgtccgctgccatcatgtcacctcccgccttttctctcctctgcacccgctgtgctcgacaatcgcagtggaaaaaaaggcgtgtgctccttttacatgcttcatgcccgacccctctccgtggcgtgtttacacttcaacgctacctcttgctcctcccccacccccgcctttgcgtgatctgccagagtcggcagtacaccaccctctcgctctcgtcctcccttgctgctcaacatccgcgcggagacacgcacccacacaggcacaccagacgccaagaaggtgagagggcgagtgagaatcagcaggggaaacctcttgccgcggtgtgcgtccgtctgtctgtctgctccttgcctctctcgacgattggcgtttgtttgctctcttagtgcatatacgatgctttacaggttttccaaatttaaatggtaccatcccaatggcgcgccgagcttggctcgagcatggtcatagctgtttcctgtgtgaaattgttatccgctcacaattccacacaacatacgagccggaagcataaagtgtaaagcctggggtgcctaatgagtgagctaactcacattaattgcgttgcgctcactgcccgctttccagtcgggaaacctgtcgtgccagctgcattaatgaatcggccaacgcgcggggagaggcggtttgcgtattgggcgctcttccgcttcctcgctcactgactcgctgcgctcggtcgttcggctgcggcgagcggtatcagctcactcaaaggcggtaatacggttatccacagaatcaggggataacgcaggaaagaacatgtgagcaaaaggccagcaaaaggccaggaaccgtaaaaaggccgcgttgctggcgtttttccataggctccgcccccctgacgagcatcacaaaaatcgacgctcaagtcagaggtggcgaaacccgacaggactataaagataccaggcgtttccccctggaagctccctcgtgcgctctcctgttccgaccctgccgcttaccggatacctgtccgcctttctcccttcgggaagcgtggcgctttctcatagctcacgctgtaggtatctcagttcggtgtaggtcgttcgctccaagctgggctgtgtgcacgaaccccccgttcagcccgaccgctgcgccttatccggtaactatcgtcttgagtccaacccggtaagacacgacttatcgccactggcagcagccactggtaacaggattagcagagcgaggtatgtaggcggtgctacagagttcttgaagtggtggcctaactacggctacactagaagaacagtatttggtatctgcgctctgctgaagccagttaccttcggaaaaagagttggtagctcttgatccggcaaacaaaccaccgctggtagcggtggtttttttgtttgcaagcagcagattacgcgcagaaaaaaaggatctcaagaagatcctttgatcttttctacggggtctgacgctcagtggaacgaaaactcacgttaagggattttggtcatgagattatcaaaaaggatcttcacctagatccttttaaattaaaaatgaagttttaaatcaatctaaagtatatatgagtaaacttggtctgacagttagaaaaactcatcgagcatcaaatgaaactgcaatttattcatatcaggattatcaataccatatttttgaaaaagccgtttctgtaatgaaggagaaaactcaccgaggcagttccataggatggcaagatcctggtatcggtctgcgattccgactcgtccaacatcaatacaacctattaatttcccctcgtcaaaaataaggttatcaagtgagaaatcaccatgagtgacgactgaatccggtgagaatggcaaaagtttatgcatttctttccagacttgttcaacaggccagccattacgctcgtcatcaaaatcactcgcatcaaccaaaccgttattcattcgtgattgcgcctgagcgagacgaaatacgcgatcgctgttaaaaggacaattacaaacaggaatcgaatgcaaccggcgcaggaacactgccagcgcatcaacaatattttcacctgaatcaggatattcttctaatacctggaatgctgttttcccagggatcgcagtggtgagtaaccatgcatcatcaggagtacggataaaatgcttgatggtcggaagaggcataaattccgtcagccagtttagtctgaccatctcatctgtaacatcattggcaacgctacctttgccatgtttcagaaacaactctggcgcatcgggcttcccatacaatcgatagattgtcgcacctgattgcccgacattatcgcgagcccatttatacccatataaatcagcatccatgttggaatttaatcgcggcctagagcaagacgtttcccgttgaatatggctcatactcttcctttttcaatattattgaagcatttatcagggttattgtctcatgagcggatacatatttgaatgtatttagaaaaataaacaaataggggttccgcgcacatttccccgaaaagtgccacctgacgtctaagaaaccattattatcatgacattaacctataaaaataggcgtatcacgaggccctttcgtc

SEQ ID NO: 47 - DNA, 4273 bp, Artificial Sequence
  pLMTB8083
tcgcgcgtttcggtgatgacggtgaaaacctctgacacatgcagctcccggagacggtcacagcttgtctgtaagcggatgccgggagcagacaagcccgtcagggcgcgtcagcgggtgttggcgggtgtcggggctggcttaactatgcggcatcagagcagattgtactgagagtgcaccatatgcggtgtgaaataccgcacagatgcgtaaggagaaaataccgcatcaggcgccattcgccattcaggctgcgcaactgttgggaagggcgatcggtgcgggcctcttcgctattacgccagctggcgaaagggggatgtgctgcaaggcgattaagttgggtaacgccagggttttcccagtcacgacgttgtaaaacgacggccagtgaattgacgcgtattgggatggtaccatttaaatttgctgctcaacatccgcgcggagacacgcacccacacaggcacaccagacgccaagaaggtgagagggcgagtgagaatcagcaggggaaacctcttgccgcggtgtgcgtccgtctgtctgtctgctccttgcctctctcgacgattggcgtttgtttgctctcttagtgcatatacgatgctttacaggttttccaaatgcggttccggatctataagcggaaggtcctgatcctgaccctggtcgtcgccgcctgcggcttcgtcctgtggtcctccaacggccggcagcggaagaacgacgccctggccccccccctgctggactccgagcccctgcggggcgccggccacttcgccgcctccgtcggcatccggcgggtctccaacgactccgccgcccccctggtccccgccgtcccccggcccgaggtcgacaacctgaccctgcggtatcggtccctggtctatcagctgaacttcgaccagatgctgcggaacgtcgacaaggacggcacctggtcccccggcgagctggtcctggtcgtccaggtccacaaccggcccgagtatctgcggctgctgatcgactccctgcggaaggcccagggcatccgggaggtcctggtcatcttctcccacgacttctggtccgccgagatcaactccctgatctcctccgtcgacttctgccccgtcctgcaggtcttcttccccttctccatccagctgtatccctccgagttccccggctccgacccccgggactgcccccgggacctgaagaagaacgccgccctgaagctgggctgcatcaacgccgagtatcccgactccttcggccactatcgggaggccaagttctcccagaccaagcaccactggtggtggaagctgcacttcgtctgggagcgggtcaaggtcctgcaggactataccggcctgatcctgttcctggaggaggaccactatctggcccccgacttctatcacgtcttcaagaagatgtggaagctgaagcagcaggagtgccccggctgcgacgtcctgtccctgggcacctataccaccatccggtccttctatggcatcgccgacaaggtcgacgtcaagacctggaagtccaccgagcacaacatgggcctggccctgacccgggacgcctatcagaagctgatcgagtgcaccgacaccttctgcacctatgacgactataactgggactggaccctgcagtatctgaccctggcctgcctgcccaaggtctggaaggtcctggtcccccaggccccccggatcttccacgccggcgactgcggcatgcaccacaagaagacctgccggccctccacccagtccgcccagatcgagtccctgctgaacaacaacaagcagtatctgttccccgagaccctggtcatcggcgagaagttccccatggccgccatctcccccccccggaagaacggcggctggggcgacatccgggaccacgagctgtgcaagtcctatcggcggctgcaggcgggagcgtatccttatgacgtccctgattacgcatatccttatgacgtccctgattacgcatatccttatgacgtccctgattacgcataaatttaaatggtaccatcccaatggcgcgccgagcttggctcgagcatggtcatagctgtttcctgtgtgaaattgttatccgctcacaattccacacaacatacgagccggaagcataaagtgtaaagcctggggtgcctaatgagtgagctaactcacattaattgcgttgcgctcactgcccgctttccagtcgggaaacctgtcgtgccagctgcattaatgaatcggccaacgcgcggggagaggcggtttgcgtattgggcgctcttccgcttcctcgctcactgactcgctgcgctcggtcgttcggctgcggcgagcggtatcagctcactcaaaggcggtaatacggttatccacagaatcaggggataacgcaggaaagaacatgtgagcaaaaggccagcaaaaggccaggaaccgtaaaaaggccgcgttgctggcgtttttccataggctccgcccccctgacgagcatcacaaaaatcgacgctcaagtcagaggtggcgaaacccgacaggactataaagataccaggcgtttccccctggaagctccctcgtgcgctctcctgttccgaccctgccgcttaccggatacctgtccgcctttctcccttcgggaagcgtggcgctttctcatagctcacgctgtaggtatctcagttcggtgtaggtcgttcgctccaagctgggctgtgtgcacgaaccccccgttcagcccgaccgctgcgccttatccggtaactatcgtcttgagtccaacccggtaagacacgacttatcgccactggcagcagccactggtaacaggattagcagagcgaggtatgtaggcggtgctacagagttcttgaagtggtggcctaactacggctacactagaagaacagtatttggtatctgcgctctgctgaagccagttaccttcggaaaaagagttggtagctcttgatccggcaaacaaaccaccgctggtagcggtggtttttttgtttgcaagcagcagattacgcgcagaaaaaaaggatctcaagaagatcctttgatcttttctacggggtctgacgctcagtggaacgaaaactcacgttaagggattttggtcatgagattatcaaaaaggatcttcacctagatccttttaaattaaaaatgaagttttaaatcaatctaaagtatatatgagtaaacttggtctgacagttagaaaaactcatcgagcatcaaatgaaactgcaatttattcatatcaggattatcaataccatatttttgaaaaagccgtttctgtaatgaaggagaaaactcaccgaggcagttccataggatggcaagatcctggtatcggtctgcgattccgactcgtccaacatcaatacaacctattaatttcccctcgtcaaaaataaggttatcaagtgagaaatcaccatgagtgacgactgaatccggtgagaatggcaaaagtttatgcatttctttccagacttgttcaacaggccagccattacgctcgtcatcaaaatcactcgcatcaaccaaaccgttattcattcgtgattgcgcctgagcgagacgaaatacgcgatcgctgttaaaaggacaattacaaacaggaatcgaatgcaaccggcgcaggaacactgccagcgcatcaacaatattttcacctgaatcaggatattcttctaatacctggaatgctgttttcccagggatcgcagtggtgagtaaccatgcatcatcaggagtacggataaaatgcttgatggtcggaagaggcataaattccgtcagccagtttagtctgaccatctcatctgtaacatcattggcaacgctacctttgccatgtttcagaaacaactctggcgcatcgggcttcccatacaatcgatagattgtcgcacctgattgcccgacattatcgcgagcccatttatacccatataaatcagcatccatgttggaatttaatcgcggcctagagcaagacgtttcccgttgaatatggctcatactcttcctttttcaatattattgaagcatttatcagggttattgtctcatgagcggatacatatttgaatgtatttagaaaaataaacaaataggggttccgcgcacatttccccgaaaagtgccacctgacgtctaagaaaccattattatcatgacattaacctataaaaataggcgtatcacgaggccctttcgtc

SEQ ID NO: 48 - DNA, 4308 bp, Artificial Sequence
  pLMTB8085
tcgcgcgtttcggtgatgacggtgaaaacctctgacacatgcagctcccggagacggtcacagcttgtctgtaagcggatgccgggagcagacaagcccgtcagggcgcgtcagcgggtgttggcgggtgtcggggctggcttaactatgcggcatcagagcagattgtactgagagtgcaccatatgcggtgtgaaataccgcacagatgcgtaaggagaaaataccgcatcaggcgccattcgccattcaggctgcgcaactgttgggaagggcgatcggtgcgggcctcttcgctattacgccagctggcgaaagggggatgtgctgcaaggcgattaagttgggtaacgccagggttttcccagtcacgacgttgtaaaacgacggccagtgaattgacgcgtattgggatggtaccatttaaattcatcggcgagaagttccccatggccgccatctcccccccccggaagaacggcggctggggcgacatccgggaccacgagctgtgcaagtcctatcggcggctgcaggcgggagcgtatccttatgacgtccctgattacgcatatccttatgacgtccctgattacgcatatccttatgacgtccctgattacgcataatcgtgcgcgtcttttcacaggcacctgcagtgatctccgctgacgctgcagttatttgctcgatctttttcgtttcggttacgtttggttttgtcatttttgaaaaaaaaagcgaacaccggcaaactaacagcgacacacccacacacatcaaaaaatcgcgaagggacgaaggcgacgcctcctgcgcggcgccccactgctccgatgggactctctcttcttcgcacaggccacatgtccgagtgctgcgtaaagccccgtggcgcgttacgcgagtgacaagagccgaggcggagaagggtgctgcggactgcactgtagatgctgtcagcgaagatgaaggggatgccgttgtgccagcgcaggtgtttcgggcgtcgttagccactcgccgccatgctgctctttgcgcgttggcccagggaggaagaagaattcaagccgcacgtacaaagcggtggtgcctccgtcctaaggcaccgagttgcgggctgtgtccgtctctctctccctcccttcctctccgttttttcctattcccgcatgccttttcatgtcgaatacgcctttttcttgtgttgctatcctccattacactcacttccccaccatacggtatgtgtctcttctcttgatactcggatgcggacgcgcgtgccgtcctcaatggccgtgtgtgcatctgctttccttctctgcccctcattggacacctgcacttgttggaccctcgtgctttctagtgcacttttccaggagcgtgtaccgttttagccttgctgctatcccacgttcgagtcggcaccgttcctgctagttcgaggacacccttgcccacatgaaaaagcctgaactcaccgcgacgtctgtcgagaagtttctgatcgaaaagttcgacagcgtctccgacctgatgcagctctcggagggcgaagaatctcgtgctttcagcttcgatgtaggagggcgtggatatgtcctgcgggtaaatagctgcgccgatggtttctacaaagatcgttatgtttatcggcactttgcatcggccgcgctcccgattccggaagtgcttgacattggggaattcagcgagagcctgacctattgcatctcccgccgtgcacagggtgtcacgttgcaagacctgcctgaaaccgaactgcccgctgttctgcagccggtcgcggaggcgatggatgcgatcgctgcggccgatcttagccagacgagcgggttcggcccattcggaccgcaaggaatcggtcaatacactacatggcgtgatttcatatgcgcgattgctgatccccatgtgtatcactggcaaactgtgatggacgacaccgtcagtgcgtccgtcgcgcaggctctcgatgagctgatgctttgggccgaggactgccccgaagtccggcacctcgtgcacgcggatttcggctccaacaatgtccatttaaatggtaccatcccaatggcgcgccgagcttggctcgagcatggtcatagctgtttcctgtgtgaaattgttatccgctcacaattccacacaacatacgagccggaagcataaagtgtaaagcctggggtgcctaatgagtgagctaactcacattaattgcgttgcgctcactgcccgctttccagtcgggaaacctgtcgtgccagctgcattaatgaatcggccaacgcgcggggagaggcggtttgcgtattgggcgctcttccgcttcctcgctcactgactcgctgcgctcggtcgttcggctgcggcgagcggtatcagctcactcaaaggcggtaatacggttatccacagaatcaggggataacgcaggaaagaacatgtgagcaaaaggccagcaaaaggccaggaaccgtaaaaaggccgcgttgctggcgtttttccataggctccgcccccctgacgagcatcacaaaaatcgacgctcaagtcagaggtggcgaaacccgacaggactataaagataccaggcgtttccccctggaagctccctcgtgcgctctcctgttccgaccctgccgcttaccggatacctgtccgcctttctcccttcgggaagcgtggcgctttctcatagctcacgctgtaggtatctcagttcggtgtaggtcgttcgctccaagctgggctgtgtgcacgaaccccccgttcagcccgaccgctgcgccttatccggtaactatcgtcttgagtccaacccggtaagacacgacttatcgccactggcagcagccactggtaacaggattagcagagcgaggtatgtaggcggtgctacagagttcttgaagtggtggcctaactacggctacactagaagaacagtatttggtatctgcgctctgctgaagccagttaccttcggaaaaagagttggtagctcttgatccggcaaacaaaccaccgctggtagcggtggtttttttgtttgcaagcagcagattacgcgcagaaaaaaaggatctcaagaagatcctttgatcttttctacggggtctgacgctcagtggaacgaaaactcacgttaagggattttggtcatgagattatcaaaaaggatcttcacctagatccttttaaattaaaaatgaagttttaaatcaatctaaagtatatatgagtaaacttggtctgacagttagaaaaactcatcgagcatcaaatgaaactgcaatttattcatatcaggattatcaataccatatttttgaaaaagccgtttctgtaatgaaggagaaaactcaccgaggcagttccataggatggcaagatcctggtatcggtctgcgattccgactcgtccaacatcaatacaacctattaatttcccctcgtcaaaaataaggttatcaagtgagaaatcaccatgagtgacgactgaatccggtgagaatggcaaaagtttatgcatttctttccagacttgttcaacaggccagccattacgctcgtcatcaaaatcactcgcatcaaccaaaccgttattcattcgtgattgcgcctgagcgagacgaaatacgcgatcgctgttaaaaggacaattacaaacaggaatcgaatgcaaccggcgcaggaacactgccagcgcatcaacaatattttcacctgaatcaggatattcttctaatacctggaatgctgttttcccagggatcgcagtggtgagtaaccatgcatcatcaggagtacggataaaatgcttgatggtcggaagaggcataaattccgtcagccagtttagtctgaccatctcatctgtaacatcattggcaacgctacctttgccatgtttcagaaacaactctggcgcatcgggcttcccatacaatcgatagattgtcgcacctgattgcccgacattatcgcgagcccatttatacccatataaatcagcatccatgttggaatttaatcgcggcctagagcaagacgtttcccgttgaatatggctcatactcttcctttttcaatattattgaagcatttatcagggttattgtctcatgagcggatacatatttgaatgtatttagaaaaataaacaaataggggttccgcgcacatttccccgaaaagtgccacctgacgtctaagaaaccattattatcatgacattaacctataaaaataggcgtatcacgaggccctttcgtc

SEQ ID NO: 49 - DNA, 3995 bp, Artificial Sequence
  pLMTB8234
tcgcgcgtttcggtgatgacggtgaaaacctctgacacatgcagctcccggagacggtcacagcttgtctgtaagcggatgccgggagcagacaagcccgtcagggcgcgtcagcgggtgttggcgggtgtcggggctggcttaactatgcggcatcagagcagattgtactgagagtgcaccatatgcggtgtgaaataccgcacagatgcgtaaggagaaaataccgcatcaggcgccattcgccattcaggctgcgcaactgttgggaagggcgatcggtgcgggcctcttcgctattacgccagctggcgaaagggggatgtgctgcaaggcgattaagttgggtaacgccagggttttcccagtcacgacgttgtaaaacgacggccagtgaattgacgcgtattgggatatttaaatatgcggttccggatttacaagcgcaaagtggtcatcttgaccctcgtcgtgattatatgcggttttgcagtgtggaacagtggcaaaccgaagaaggccagcacggtgtttccgaaagaggtggagacagtgaagcgcagtagtgtgggcagccaaatccaggcgaccattcctgtcacgcggaagccgatcaacgagtcgatcccagagaagcagcagcagcaacagcctgtggcaaagtctgaagcagacaacacgacacttgtctaccggggcatcgtgttccagttgaactttgaccagaacctcaaaaacgaggagaagtttcgagcggttcgccagaaggacgacctggttatcgtcgtccaggtgcacaaccgcccggagtatctgcgtcttctggtggatagcttgcgaaagagcaagggtattgagaacatactccttattttcagccacgacttctggtcgcctgagatcaatcaaatcgtagcttcggtagatttctgcctcgtgctgcaaatcttctttccattctccatccagttgtatccccaagagtttcccggcaacgacccccgagactgcccccgcgacatccctaaaaaggaggcactgacacttggctgcatcaacgcagaatacccggattcatttggccactaccgcgaggccaaatttagtcagacgaagcaccattggtggtggaagctgcattttgtgtgggaccgggtgcgggtgctgaaggaccataaggggctggtgctgctgatcgaggaggaccactacctcgctcccgatttctaccaccttctgaagctgatggcaagtctcaagaaggagcagtgccctgactgtgatatactctctctggggtcgtatggccacatcggctactcatcaaaggcaaataaggttgaggtcaaggcctggaagtccacggagcacaacatgggcatggccctcaaccgcgatgcctaccagaaactcctccgctgcacggacgcgttttgcacctatgatgactataactgggactggagcctgcagcatctgacagtcacgtgtctgcccgcgtttctcaaggtgatggtttcggaggcaccacggatatttcacgctggcgactgcgggatgcaccacaagaagtctgcctgcatgccgagcggccagaagacaaagattgagaacgtgctccagaatagcggtaatcagctcttccctaagcagctcttgatcacgaagcgactgcccgcgtcgggggcgaagggcgtagccccccatgtgaagaacggcggttggggcgacatccgggaccacgaactgtgcaagtcttacctgcgccttcagtagatttaaatatcccaatggcgcgccgagcttggctcgagcatggtcatagctgtttcctgtgtgaaattgttatccgctcacaattccacacaacatacgagccggaagcataaagtgtaaagcctggggtgcctaatgagtgagctaactcacattaattgcgttgcgctcactgcccgctttccagtcgggaaacctgtcgtgccagctgcattaatgaatcggccaacgcgcggggagaggcggtttgcgtattgggcgctcttccgcttcctcgctcactgactcgctgcgctcggtcgttcggctgcggcgagcggtatcagctcactcaaaggcggtaatacggttatccacagaatcaggggataacgcaggaaagaacatgtgagcaaaaggccagcaaaaggccaggaaccgtaaaaaggccgcgttgctggcgtttttccataggctccgcccccctgacgagcatcacaaaaatcgacgctcaagtcagaggtggcgaaacccgacaggactataaagataccaggcgtttccccctggaagctccctcgtgcgctctcctgttccgaccctgccgcttaccggatacctgtccgcctttctcccttcgggaagcgtggcgctttctcatagctcacgctgtaggtatctcagttcggtgtaggtcgttcgctccaagctgggctgtgtgcacgaaccccccgttcagcccgaccgctgcgccttatccggtaactatcgtcttgagtccaacccggtaagacacgacttatcgccactggcagcagccactggtaacaggattagcagagcgaggtatgtaggcggtgctacagagttcttgaagtggtggcctaactacggctacactagaagaacagtatttggtatctgcgctctgctgaagccagttaccttcggaaaaagagttggtagctcttgatccggcaaacaaaccaccgctggtagcggtggtttttttgtttgcaagcagcagattacgcgcagaaaaaaaggatctcaagaagatcctttgatcttttctacggggtctgacgctcagtggaacgaaaactcacgttaagggattttggtcatgagattatcaaaaaggatcttcacctagatccttttaaattaaaaatgaagttttaaatcaatctaaagtatatatgagtaaacttggtctgacagttagaaaaactcatcgagcatcaaatgaaactgcaatttattcatatcaggattatcaataccatatttttgaaaaagccgtttctgtaatgaaggagaaaactcaccgaggcagttccataggatggcaagatcctggtatcggtctgcgattccgactcgtccaacatcaatacaacctattaatttcccctcgtcaaaaataaggttatcaagtgagaaatcaccatgagtgacgactgaatccggtgagaatggcaaaagtttatgcatttctttccagacttgttcaacaggccagccattacgctcgtcatcaaaatcactcgcatcaaccaaaccgttattcattcgtgattgcgcctgagcgagacgaaatacgcgatcgctgttaaaaggacaattacaaacaggaatcgaatgcaaccggcgcaggaacactgccagcgcatcaacaatattttcacctgaatcaggatattcttctaatacctggaatgctgttttcccagggatcgcagtggtgagtaaccatgcatcatcaggagtacggataaaatgcttgatggtcggaagaggcataaattccgtcagccagtttagtctgaccatctcatctgtaacatcattggcaacgctacctttgccatgtttcagaaacaactctggcgcatcgggcttcccatacaatcgatagattgtcgcacctgattgcccgacattatcgcgagcccatttatacccatataaatcagcatccatgttggaatttaatcgcggcctagagcaagacgtttcccgttgaatatggctcatactcttcctttttcaatattattgaagcatttatcagggttattgtctcatgagcggatacatatttgaatgtatttagaaaaataaacaaataggggttccgcgcacatttccccgaaaagtgccacctgacgtctaagaaaccattattatcatgacattaacctataaaaataggcgtatcacgaggccctttcgtc

SEQ ID NO: 50 - DNA, 3986 bp, Artificial Sequence
  pLMTB8235
tcgcgcgtttcggtgatgacggtgaaaacctctgacacatgcagctcccggagacggtcacagcttgtctgtaagcggatgccgggagcagacaagcccgtcagggcgcgtcagcgggtgttggcgggtgtcggggctggcttaactatgcggcatcagagcagattgtactgagagtgcaccatatgcggtgtgaaataccgcacagatgcgtaaggagaaaataccgcatcaggcgccattcgccattcaggctgcgcaactgttgggaagggcgatcggtgcgggcctcttcgctattacgccagctggcgaaagggggatgtgctgcaaggcgattaagttgggtaacgccagggttttcccagtcacgacgttgtaaaacgacggccagtgaattgacgcgtattgggatatttaaatatgctgaagaagcagtccgccgggttggtgctgtggggcgcaataatctttgttggctggaacgcgctccttctgctttttttctggacccgccctgcccccggacgcctcccttcggacagcgctctcggggacgaccccgcaagccttacgcgtgaagtcattcacctggcagaggatgctgaggcggagcttgagcgccaacgtggcttgcttcaacagattaaggaacactacagcctgtggcgccagcgctggcgggtgccaacagtcgctccaccggcctggccacgcgtaccaggaacaccgagccccgctgtaattcctatattggtgattgcgtgcgatcgatctacagtccgccgctgccttgataagttgctccactatcgtccatccgccgagcacttccccatcatcgtctcgcaagactgcggtcatgaggagacggcccaggtcattgcaagctacggcactgcggttacgcatatccgtcaacccgacctctccaatatcgctgtccaacccgaccaccgaaagtttcagggatactacaagattgcacgacattaccggtgggcccttggacaaatttttaacaaattcaagttcccggccgctgttgtggtagaagatgacctcgaggtggcacctgacttctttgagtacttccaggcgacgtacccactgctgaaggcagaccctagtctgtggtgtgtgtccgcgtggaacgacaatggtaaggaacagatggtggatagctcgaagccagagctcctctaccgtactgatttctttccaggccttggatggctcctcttggcagatctgtgggcggagctcgaaccgaagtggccgaaggcattttgggacgattggatgcggcgtcccgagcagcgcaaggggcgtgcgtgcatccgaccggagatcagccggacgatgacttttggtcgcaagggtgtatcccacggccagttttttgatcagcacctcaagttcatcaagctcaatcagcagtttgtgcccttcacgcagctggacctgagctacttgcagcgcgaagcatatgaccgcgactttttggctcaggtgtacggtgcgccgcagcttcaggtggagaaggtccggaccaatgatcgtaaggagcttggcgaggtgcgtgtccagtatacgtcccgcgacagctttaaggcatttgctaaagccttgggtgtcatggatgatctgaagtctggcgtgccccgtgcaggctaccgtggaatcgtgaccttccagttccggggtcgccgggtccacctcgccccgccggagacctggaacggctacgacccgtcctggaattgaatttaaatatcccaatggcgcgccgagcttggctcgagcatggtcatagctgtttcctgtgtgaaattgttatccgctcacaattccacacaacatacgagccggaagcataaagtgtaaagcctggggtgcctaatgagtgagctaactcacattaattgcgttgcgctcactgcccgctttccagtcgggaaacctgtcgtgccagctgcattaatgaatcggccaacgcgcggggagaggcggtttgcgtattgggcgctcttccgcttcctcgctcactgactcgctgcgctcggtcgttcggctgcggcgagcggtatcagctcactcaaaggcggtaatacggttatccacagaatcaggggataacgcaggaaagaacatgtgagcaaaaggccagcaaaaggccaggaaccgtaaaaaggccgcgttgctggcgtttttccataggctccgcccccctgacgagcatcacaaaaatcgacgctcaagtcagaggtggcgaaacccgacaggactataaagataccaggcgtttccccctggaagctccctcgtgcgctctcctgttccgaccctgccgcttaccggatacctgtccgcctttctcccttcgggaagcgtggcgctttctcatagctcacgctgtaggtatctcagttcggtgtaggtcgttcgctccaagctgggctgtgtgcacgaaccccccgttcagcccgaccgctgcgccttatccggtaactatcgtcttgagtccaacccggtaagacacgacttatcgccactggcagcagccactggtaacaggattagcagagcgaggtatgtaggcggtgctacagagttcttgaagtggtggcctaactacggctacactagaagaacagtatttggtatctgcgctctgctgaagccagttaccttcggaaaaagagttggtagctcttgatccggcaaacaaaccaccgctggtagcggtggtttttttgtttgcaagcagcagattacgcgcagaaaaaaaggatctcaagaagatcctttgatcttttctacggggtctgacgctcagtggaacgaaaactcacgttaagggattttggtcatgagattatcaaaaaggatcttcacctagatccttttaaattaaaaatgaagttttaaatcaatctaaagtatatatgagtaaacttggtctgacagttagaaaaactcatcgagcatcaaatgaaactgcaatttattcatatcaggattatcaataccatatttttgaaaaagccgtttctgtaatgaaggagaaaactcaccgaggcagttccataggatggcaagatcctggtatcggtctgcgattccgactcgtccaacatcaatacaacctattaatttcccctcgtcaaaaataaggttatcaagtgagaaatcaccatgagtgacgactgaatccggtgagaatggcaaaagtttatgcatttctttccagacttgttcaacaggccagccattacgctcgtcatcaaaatcactcgcatcaaccaaaccgttattcattcgtgattgcgcctgagcgagacgaaatacgcgatcgctgttaaaaggacaattacaaacaggaatcgaatgcaaccggcgcaggaacactgccagcgcatcaacaatattttcacctgaatcaggatattcttctaatacctggaatgctgttttcccagggatcgcagtggtgagtaaccatgcatcatcaggagtacggataaaatgcttgatggtcggaagaggcataaattccgtcagccagtttagtctgaccatctcatctgtaacatcattggcaacgctacctttgccatgtttcagaaacaactctggcgcatcgggcttcccatacaatcgatagattgtcgcacctgattgcccgacattatcgcgagcccatttatacccatataaatcagcatccatgttggaatttaatcgcggcctagagcaagacgtttcccgttgaatatggctcatactcttcctttttcaatattattgaagcatttatcagggttattgtctcatgagcggatacatatttgaatgtatttagaaaaataaacaaataggggttccgcgcacatttccccgaaaagtgccacctgacgtctaagaaaccattattatcatgacattaacctataaaaataggcgtatcacgaggccctttcgtc

SEQ ID NO: 51 - DNA, 3989 bp, Artificial Sequence
  pLMTB8236
tcgcgcgtttcggtgatgacggtgaaaacctctgacacatgcagctcccggagacggtcacagcttgtctgtaagcggatgccgggagcagacaagcccgtcagggcgcgtcagcgggtgttggcgggtgtcggggctggcttaactatgcggcatcagagcagattgtactgagagtgcaccatatgcggtgtgaaataccgcacagatgcgtaaggagaaaataccgcatcaggcgccattcgccattcaggctgcgcaactgttgggaagggcgatcggtgcgggcctcttcgctattacgccagctggcgaaagggggatgtgctgcaaggcgattaagttgggtaacgccagggttttcccagtcacgacgttgtaaaacgacggccagtgaattgacgcgtattgggatatttaaatatgttgaagaagcagtcagcggggcttgtgctctggggagcgatcctcttcgtggcctggaacgctcttctgctcctgtttttctggacccgtccggccccgggccgcccgccgtcggtctccgcactggacggcgatcctgcttctctcacccgggaggtaattcgcttggctcaggatgcggaggtggaattggagcgtcagcggggcctcctccagcagattggcgacgcacttagctcgcagcgggggcgtgtgccaacggcggcccctccagcgcagccccgcgtgcccgtgaccccggcaccggcagtcatcccgatcctcgtgattgcgtgcgaccgtagcacggtccgccgctgtttggataagcttttgcactatcggccgtcagcggagcttttcccaatcatcgtgtcccaggattgcggacatgaggaaacagcgcaagctatcgcgtcttacggcagcgcagtgacgcatattcgacagccggatctgagttctatcgccgtccctcctgatcatcgaaagttccagggatactataagattgcccgtcattatcgatgggcccttggccaggtattccgccagttccgtttccctgccgccgtcgtagttgaagacgacctcgaggtggcgccggatttcttcgagtactttcgtgccacgtatcctctgcttaaggcagacccgtcgctgtggtgcgtgtctgcgtggaatgacaatgggaaggagcagatggtggatgcctcacgtccggagttgctttatcgaaccgactttttccccggcctcggttggttgcttctcgccgaactgtgggcggagcttgaacctaaatggccgaaggcgttctgggacgactggatgcgccgtccggagcagcgtcagggtcgcgcctgcatccggcccgagatctcgcgtacaatgaccttcgggcgaaaaggggtatcccatggccagttttttgatcagcatctcaagttcattaagctgaaccaacaatttgtgcattttacgcaactcgacctgagctatctgcagcgcgaggcctacgatcgcgactttctggcacgggtgtacggtgcccctcagctgcaggtggagaaggtccgcacgaatgaccgcaaggagctcggtgaggtgcgggttcagtacaccggtcgcgacagttttaaggcattcgcgaaggcactgggggtgatggacgacctgaagtccggcgtgccccgcgcgggttaccgcggaatcgtgacgttccagttccgcggccgccgagtgcacctggcgccgccacttacgtgggaaggctacgacccttcatggaacgcgggcgcgtagatttaaatatcccaatggcgcgccgagcttggctcgagcatggtcatagctgtttcctgtgtgaaattgttatccgctcacaattccacacaacatacgagccggaagcataaagtgtaaagcctggggtgcctaatgagtgagctaactcacattaattgcgttgcgctcactgcccgctttccagtcgggaaacctgtcgtgccagctgcattaatgaatcggccaacgcgcggggagaggcggtttgcgtattgggcgctcttccgcttcctcgctcactgactcgctgcgctcggtcgttcggctgcggcgagcggtatcagctcactcaaaggcggtaatacggttatccacagaatcaggggataacgcaggaaagaacatgtgagcaaaaggccagcaaaaggccaggaaccgtaaaaaggccgcgttgctggcgtttttccataggctccgcccccctgacgagcatcacaaaaatcgacgctcaagtcagaggtggcgaaacccgacaggactataaagataccaggcgtttccccctggaagctccctcgtgcgctctcctgttccgaccctgccgcttaccggatacctgtccgcctttctcccttcgggaagcgtggcgctttctcatagctcacgctgtaggtatctcagttcggtgtaggtcgttcgctccaagctgggctgtgtgcacgaaccccccgttcagcccgaccgctgcgccttatccggtaactatcgtcttgagtccaacccggtaagacacgacttatcgccactggcagcagccactggtaacaggattagcagagcgaggtatgtaggcggtgctacagagttcttgaagtggtggcctaactacggctacactagaagaacagtatttggtatctgcgctctgctgaagccagttaccttcggaaaaagagttggtagctcttgatccggcaaacaaaccaccgctggtagcggtggtttttttgtttgcaagcagcagattacgcgcagaaaaaaaggatctcaagaagatcctttgatcttttctacggggtctgacgctcagtggaacgaaaactcacgttaagggattttggtcatgagattatcaaaaaggatcttcacctagatccttttaaattaaaaatgaagttttaaatcaatctaaagtatatatgagtaaacttggtctgacagttagaaaaactcatcgagcatcaaatgaaactgcaatttattcatatcaggattatcaataccatatttttgaaaaagccgtttctgtaatgaaggagaaaactcaccgaggcagttccataggatggcaagatcctggtatcggtctgcgattccgactcgtccaacatcaatacaacctattaatttcccctcgtcaaaaataaggttatcaagtgagaaatcaccatgagtgacgactgaatccggtgagaatggcaaaagtttatgcatttctttccagacttgttcaacaggccagccattacgctcgtcatcaaaatcactcgcatcaaccaaaccgttattcattcgtgattgcgcctgagcgagacgaaatacgcgatcgctgttaaaaggacaattacaaacaggaatcgaatgcaaccggcgcaggaacactgccagcgcatcaacaatattttcacctgaatcaggatattcttctaatacctggaatgctgttttcccagggatcgcagtggtgagtaaccatgcatcatcaggagtacggataaaatgcttgatggtcggaagaggcataaattccgtcagccagtttagtctgaccatctcatctgtaacatcattggcaacgctacctttgccatgtttcagaaacaactctggcgcatcgggcttcccatacaatcgatagattgtcgcacctgattgcccgacattatcgcgagcccatttatacccatataaatcagcatccatgttggaatttaatcgcggcctagagcaagacgtttcccgttgaatatggctcatactcttcctttttcaatattattgaagcatttatcagggttattgtctcatgagcggatacatatttgaatgtatttagaaaaataaacaaataggggttccgcgcacatttccccgaaaagtgccacctgacgtctaagaaaccattattatcatgacattaacctataaaaataggcgtatcacgaggccctttcgtc

SEQ ID NO: 52 - DNA, 3980 bp, Artificial Sequence
  pLMTB8237
tcgcgcgtttcggtgatgacggtgaaaacctctgacacatgcagctcccggagacggtcacagcttgtctgtaagcggatgccgggagcagacaagcccgtcagggcgcgtcagcgggtgttggcgggtgtcggggctggcttaactatgcggcatcagagcagattgtactgagagtgcaccatatgcggtgtgaaataccgcacagatgcgtaaggagaaaataccgcatcaggcgccattcgccattcaggctgcgcaactgttgggaagggcgatcggtgcgggcctcttcgctattacgccagctggcgaaagggggatgtgctgcaaggcgattaagttgggtaacgccagggttttcccagtcacgacgttgtaaaacgacggccagtgaattgacgcgtattgggatatttaaatatgcgtttccgaatttacaagcgtaaggtgctgatcctcacccttgtcgtcgctgcgtgcggttttgtgctttggagctcgaacgggcgacagcgtaagaacgacgcgcttgcaccaccgctcctggattccgagccgctccgcggcgcggggcatttcgcagctagcgtagggatccggcgtgtgagtaacgacagcgcagctccgctggtcccggcggtgccgcgccctgaggtcgacaacctgacactgcgataccggtccctggtgtaccagctgaacttcgaccaaatgcttcggaacgtcgacaaggacggtacgtggagccctggggagctggtgttggtggtgcaggttcacaatcgcccggagtacttgcgtctccttattgactcgctccgcaaggcacagggcatccgcgaggtgctggttatcttctcgcacgatttctggagcgcggaaatcaacagcctgattagctcagttgatttctgcccggtgctgcaggtgttcttcccgttctccatccagttgtacccatccgagttccccggctcagatccccgggactgcccacgcgatctgaagaaaaacgctgctctgaaactgggctgcatcaacgccgagtaccctgactctttcgggcactaccgggaggcgaagttcagccaaacgaagcatcactggtggtggaagctgcactttgtgtgggagcgcgtgaaggtcctgcaggactacacgggcctcatcttgttcctggaggaggaccactatcttgcacccgacttctaccatgtgtttaagaaaatgtggaagctgaaacagcaggagtgtccgggctgcgacgtgctttctctgggcacttacacaactatccgctctttctacggcatcgccgacaaagtggatgtgaagacctggaagtccactgagcacaacatgggattggcgctcacccgagatgcctaccagaaactgatcgagtgcaccgacacattctgcacctatgacgactataactgggactggactctccagtacctgacattggcgtgcctgccgaaggtctggaaggtgctggtgccacaggcccctcgcatttttcacgctggcgactgcggcatgcaccacaaaaagacatgccgcccttccacccagagcgctcaaattgagtcgctgctcaataacaacaaacagtaccttttcccggagacactcgtaataggggaaaagtttccaatggcggctatctctcccccacgcaagaatggtggctggggcgatatacgcgaccatgagctgtgtaaaagttaccggcgcctgcaagccggcgcctagatttaaatatcccaatggcgcgccgagcttggctcgagcatggtcatagctgtttcctgtgtgaaattgttatccgctcacaattccacacaacatacgagccggaagcataaagtgtaaagcctggggtgcctaatgagtgagctaactcacattaattgcgttgcgctcactgcccgctttccagtcgggaaacctgtcgtgccagctgcattaatgaatcggccaacgcgcggggagaggcggtttgcgtattgggcgctcttccgcttcctcgctcactgactcgctgcgctcggtcgttcggctgcggcgagcggtatcagctcactcaaaggcggtaatacggttatccacagaatcaggggataacgcaggaaagaacatgtgagcaaaaggccagcaaaaggccaggaaccgtaaaaaggccgcgttgctggcgtttttccataggctccgcccccctgacgagcatcacaaaaatcgacgctcaagtcagaggtggcgaaacccgacaggactataaagataccaggcgtttccccctggaagctccctcgtgcgctctcctgttccgaccctgccgcttaccggatacctgtccgcctttctcccttcgggaagcgtggcgctttctcatagctcacgctgtaggtatctcagttcggtgtaggtcgttcgctccaagctgggctgtgtgcacgaaccccccgttcagcccgaccgctgcgccttatccggtaactatcgtcttgagtccaacccggtaagacacgacttatcgccactggcagcagccactggtaacaggattagcagagcgaggtatgtaggcggtgctacagagttcttgaagtggtggcctaactacggctacactagaagaacagtatttggtatctgcgctctgctgaagccagttaccttcggaaaaagagttggtagctcttgatccggcaaacaaaccaccgctggtagcggtggtttttttgtttgcaagcagcagattacgcgcagaaaaaaaggatctcaagaagatcctttgatcttttctacggggtctgacgctcagtggaacgaaaactcacgttaagggattttggtcatgagattatcaaaaaggatcttcacctagatccttttaaattaaaaatgaagttttaaatcaatctaaagtatatatgagtaaacttggtctgacagttagaaaaactcatcgagcatcaaatgaaactgcaatttattcatatcaggattatcaataccatatttttgaaaaagccgtttctgtaatgaaggagaaaactcaccgaggcagttccataggatggcaagatcctggtatcggtctgcgattccgactcgtccaacatcaatacaacctattaatttcccctcgtcaaaaataaggttatcaagtgagaaatcaccatgagtgacgactgaatccggtgagaatggcaaaagtttatgcatttctttccagacttgttcaacaggccagccattacgctcgtcatcaaaatcactcgcatcaaccaaaccgttattcattcgtgattgcgcctgagcgagacgaaatacgcgatcgctgttaaaaggacaattacaaacaggaatcgaatgcaaccggcgcaggaacactgccagcgcatcaacaatattttcacctgaatcaggatattcttctaatacctggaatgctgttttcccagggatcgcagtggtgagtaaccatgcatcatcaggagtacggataaaatgcttgatggtcggaagaggcataaattccgtcagccagtttagtctgaccatctcatctgtaacatcattggcaacgctacctttgccatgtttcagaaacaactctggcgcatcgggcttcccatacaatcgatagattgtcgcacctgattgcccgacattatcgcgagcccatttatacccatataaatcagcatccatgttggaatttaatcgcggcctagagcaagacgtttcccgttgaatatggctcatactcttcctttttcaatattattgaagcatttatcagggttattgtctcatgagcggatacatatttgaatgtatttagaaaaataaacaaataggggttccgcgcacatttccccgaaaagtgccacctgacgtctaagaaaccattattatcatgacattaacctataaaaataggcgtatcacgaggccctttcgtc

SEQ ID NO: 53 - DNA, 3989 bp, Artificial Sequence
  pLMTB8238
tcgcgcgtttcggtgatgacggtgaaaacctctgacacatgcagctcccggagacggtcacagcttgtctgtaagcggatgccgggagcagacaagcccgtcagggcgcgtcagcgggtgttggcgggtgtcggggctggcttaactatgcggcatcagagcagattgtactgagagtgcaccatatgcggtgtgaaataccgcacagatgcgtaaggagaaaataccgcatcaggcgccattcgccattcaggctgcgcaactgttgggaagggcgatcggtgcgggcctcttcgctattacgccagctggcgaaagggggatgtgctgcaaggcgattaagttgggtaacgccagggttttcccagtcacgacgttgtaaaacgacggccagtgaattgacgcgtattgggatatttaaatatgctgaagaagagctcgctcgtgctgtggggtgtggtactgttcgtggcatggaacgcccttatcttgttcttcctgtggactcgaccgcaaagcctctccgatcacagccatctcacggaggaggtgattcggcttgcgcaggatgccgagtctgaattggagcgtcagaaggacctgttgcagcagatctaccgttattctgcactgtggtcccggcgcaaggcgtccgaagccaagctccatccgccggtcgccgcaagtgcgcagccttcaacggcggcacccctcagccatcactcgcagatcagcccggatgcggttttgccagtgctcgtgatcgcgtgcgatcggtcgacagtccgtcgctgcctggacaagttgctgcactaccgcccgtcacaggagcgtttcccaatcatcgtgtcgcaggactgtgggcacgacgagacagcgcgagtcatagctagttatggcgacgccatcatgcacatcaaacagccaaacttgagcgacattccggtgccgaccgaccatcgtaagttccagggctactacaagatcgcgcggcattaccattgggcactctcacaggtgttccgtacgtttcagtatcaggcggcgattgtcgtggaggatgacttggaggttgcccctgatttcttcgagtactttcaagctgcctttccgcttctcctggcagacccaacactgtggtgtgtctccgcgtggaacgataatgggaaagagcaaatggtggatgccgcgcacccagatctgctctaccgtaccgattttttcccggggctcggatggcttctcctgagcgatttgtggaacgaactcgagcccaagtggccaaaggccttctgggacgactggatgcgacagcctgagcagcggcagggacgatcttgtatacgcccagaggttagccgaactatgactttcggtcgaaagggcgtctcccacgggcagttttttgatcagcacctcaagtttatcaagctgaacgatcacttcgtcccattcacccaaatggacctcagctacctcaagaagaacgagtacgaccggtcttttctggaccaggtgtacggtgcacccgagctgcgagttgaggagcttcagggtaaccggcgccgcgagctgggcacggtgcgagtgcagtacacaactcgcgactccttcaaggcgttcgctaaggcgctgggtgtcatggacgaccttaagtccggtgtgccgcgtgccggttaccgtggcatcgtttcgtttctctatcagagccgccgggtctatctggccccgccttccgactggacaggatacgatcccagctggagctagatttaaatatcccaatggcgcgccgagcttggctcgagcatggtcatagctgtttcctgtgtgaaattgttatccgctcacaattccacacaacatacgagccggaagcataaagtgtaaagcctggggtgcctaatgagtgagctaactcacattaattgcgttgcgctcactgcccgctttccagtcgggaaacctgtcgtgccagctgcattaatgaatcggccaacgcgcggggagaggcggtttgcgtattgggcgctcttccgcttcctcgctcactgactcgctgcgctcggtcgttcggctgcggcgagcggtatcagctcactcaaaggcggtaatacggttatccacagaatcaggggataacgcaggaaagaacatgtgagcaaaaggccagcaaaaggccaggaaccgtaaaaaggccgcgttgctggcgtttttccataggctccgcccccctgacgagcatcacaaaaatcgacgctcaagtcagaggtggcgaaacccgacaggactataaagataccaggcgtttccccctggaagctccctcgtgcgctctcctgttccgaccctgccgcttaccggatacctgtccgcctttctcccttcgggaagcgtggcgctttctcatagctcacgctgtaggtatctcagttcggtgtaggtcgttcgctccaagctgggctgtgtgcacgaaccccccgttcagcccgaccgctgcgccttatccggtaactatcgtcttgagtccaacccggtaagacacgacttatcgccactggcagcagccactggtaacaggattagcagagcgaggtatgtaggcggtgctacagagttcttgaagtggtggcctaactacggctacactagaagaacagtatttggtatctgcgctctgctgaagccagttaccttcggaaaaagagttggtagctcttgatccggcaaacaaaccaccgctggtagcggtggtttttttgtttgcaagcagcagattacgcgcagaaaaaaaggatctcaagaagatcctttgatcttttctacggggtctgacgctcagtggaacgaaaactcacgttaagggattttggtcatgagattatcaaaaaggatcttcacctagatccttttaaattaaaaatgaagttttaaatcaatctaaagtatatatgagtaaacttggtctgacagttagaaaaactcatcgagcatcaaatgaaactgcaatttattcatatcaggattatcaataccatatttttgaaaaagccgtttctgtaatgaaggagaaaactcaccgaggcagttccataggatggcaagatcctggtatcggtctgcgattccgactcgtccaacatcaatacaacctattaatttcccctcgtcaaaaataaggttatcaagtgagaaatcaccatgagtgacgactgaatccggtgagaatggcaaaagtttatgcatttctttccagacttgttcaacaggccagccattacgctcgtcatcaaaatcactcgcatcaaccaaaccgttattcattcgtgattgcgcctgagcgagacgaaatacgcgatcgctgttaaaaggacaattacaaacaggaatcgaatgcaaccggcgcaggaacactgccagcgcatcaacaatattttcacctgaatcaggatattcttctaatacctggaatgctgttttcccagggatcgcagtggtgagtaaccatgcatcatcaggagtacggataaaatgcttgatggtcggaagaggcataaattccgtcagccagtttagtctgaccatctcatctgtaacatcattggcaacgctacctttgccatgtttcagaaacaactctggcgcatcgggcttcccatacaatcgatagattgtcgcacctgattgcccgacattatcgcgagcccatttatacccatataaatcagcatccatgttggaatttaatcgcggcctagagcaagacgtttcccgttgaatatggctcatactcttcctttttcaatattattgaagcatttatcagggttattgtctcatgagcggatacatatttgaatgtatttagaaaaataaacaaataggggttccgcgcacatttccccgaaaagtgccacctgacgtctaagaaaccattattatcatgacattaacctataaaaataggcgtatcacgaggccctttcgtc

SEQ ID NO: 54 - DNA, 4339 bp, Artificial Sequence
  pLMTB8247
tcgcgcgtttcggtgatgacggtgaaaacctctgacacatgcagctcccggagacggtcacagcttgtctgtaagcggatgccgggagcagacaagcccgtcagggcgcgtcagcgggtgttggcgggtgtcggggctggcttaactatgcggcatcagagcagattgtactgagagtgcaccatatgcggtgtgaaataccgcacagatgcgtaaggagaaaataccgcatcaggcgccattcgccattcaggctgcgcaactgttgggaagggcgatcggtgcgggcctcttcgctattacgccagctggcgaaagggggatgtgctgcaaggcgattaagttgggtaacgccagggttttcccagtcacgacgttgtaaaacgacggccagtgaattgacgcgtattgggatatttaaatgcgcgcagcgcacagccgtcttctcccgcctccgcgtgccgccttactgggtactgcgcacgtccgtcgtgcgaccatcaagatacgatccccacggcaaggttaaggccccccgctcgtgtctctttcctctgccgtggactgcctctcgtcccgtttctccgtcttcctttgccccacctccccgagcgacggcggtggcgtgcggtagggcgacgtgctgggctgccatcccccctagcctctgcactccccagctctactgccgatctgcagtcacgtgcccgtcgcctccccgctgcccactggcccaacgcgctctccgcccacctctcctcgcactcccttcctgcttcctccttctacacattcgccagcgcccccatcctgcccccccccctctacgcacacccacactcacgcgcacaccgccgtgcacaagtcctcgtcctagctaccacgaaccatacagtccacagcacccctgcgccccgagagtcatgcgcctccgcgaacccctcctgagcggctccgcagcgatgcctggggcttcgctgcagcgcgcctgtcggctgctcgtagcggtctgcgcactccaccttggcgtgactctcgtctactatctggcgggacgagatctgtcgcgcctcccacagctcgtgggtgtgtcgacgccgctgcaaggaggctcaaattcggccgcggccatcggtcagagctccggcgagctgcgcacgggaggagcacgcccgccacctccgctgggtgcatcgtctcagccccgtccgggcggcgacagttcaccggttgtggactcgggtccaggacctgcatctaaccttacgtccgtgcccgtaccacacacgacggctctttcgcttccagcctgtcccgaagagtcccctctgcttgttggtccgatgttgatcgagttcaacatgcctgttgatctcgaattggtggcaaaacaaaacccaaacgtgaaaatgggaggccggtacgccccgcgagattgcgtgtcgcctcacaaggttgcgatcatcatcccctttcggaatcgccaggaacaccttaagtactggttgtactacctccaccccgttttgcagcgccagcagttggattatggcatctacgtcattaaccaggccggtgatacgatttttaaccgcgccaagctgctcaacgtgggttttcaggaggcgctcaaggactacgattacacgtgcttcgtcttttccgacgttgatttgattcctatgaacgaccacaatgcgtatcggtgtttcagccagccgcgccacatttcggtagccatggataagtttggattctccctgccttacgtacaatacttcggcggcgtgagcgcattgtcgaagcaacagttcctgacgatcaacggctttccaaacaattactggggttggggcggggaagacgacgacatcttcaatcgtctggtgtttcgtgggatgtctatttcccgcccgaacgcagtcgtcggtcgctgccgtatgatccgacattctcgtgataagaagaacgagcctaacccacagcgcttcgaccgaatcgctcatactaaggaaacgatgctctccgacgggctcaactctctcacataccaggtcctcgacgtgcagcgctatccactttacacgcagattacggtcgacatcggcaccccgtcgtgaatttaaatatcccaatggcgcgccgagcttggctcgagcatggtcatagctgtttcctgtgtgaaattgttatccgctcacaattccacacaacatacgagccggaagcataaagtgtaaagcctggggtgcctaatgagtgagctaactcacattaattgcgttgcgctcactgcccgctttccagtcgggaaacctgtcgtgccagctgcattaatgaatcggccaacgcgcggggagaggcggtttgcgtattgggcgctcttccgcttcctcgctcactgactcgctgcgctcggtcgttcggctgcggcgagcggtatcagctcactcaaaggcggtaatacggttatccacagaatcaggggataacgcaggaaagaacatgtgagcaaaaggccagcaaaaggccaggaaccgtaaaaaggccgcgttgctggcgtttttccataggctccgcccccctgacgagcatcacaaaaatcgacgctcaagtcagaggtggcgaaacccgacaggactataaagataccaggcgtttccccctggaagctccctcgtgcgctctcctgttccgaccctgccgcttaccggatacctgtccgcctttctcccttcgggaagcgtggcgctttctcatagctcacgctgtaggtatctcagttcggtgtaggtcgttcgctccaagctgggctgtgtgcacgaaccccccgttcagcccgaccgctgcgccttatccggtaactatcgtcttgagtccaacccggtaagacacgacttatcgccactggcagcagccactggtaacaggattagcagagcgaggtatgtaggcggtgctacagagttcttgaagtggtggcctaactacggctacactagaagaacagtatttggtatctgcgctctgctgaagccagttaccttcggaaaaagagttggtagctcttgatccggcaaacaaaccaccgctggtagcggtggtttttttgtttgcaagcagcagattacgcgcagaaaaaaaggatctcaagaagatcctttgatcttttctacggggtctgacgctcagtggaacgaaaactcacgttaagggattttggtcatgagattatcaaaaaggatcttcacctagatccttttaaattaaaaatgaagttttaaatcaatctaaagtatatatgagtaaacttggtctgacagttagaaaaactcatcgagcatcaaatgaaactgcaatttattcatatcaggattatcaataccatatttttgaaaaagccgtttctgtaatgaaggagaaaactcaccgaggcagttccataggatggcaagatcctggtatcggtctgcgattccgactcgtccaacatcaatacaacctattaatttcccctcgtcaaaaataaggttatcaagtgagaaatcaccatgagtgacgactgaatccggtgagaatggcaaaagtttatgcatttctttccagacttgttcaacaggccagccattacgctcgtcatcaaaatcactcgcatcaaccaaaccgttattcattcgtgattgcgcctgagcgagacgaaatacgcgatcgctgttaaaaggacaattacaaacaggaatcgaatgcaaccggcgcaggaacactgccagcgcatcaacaatattttcacctgaatcaggatattcttctaatacctggaatgctgttttcccagggatcgcagtggtgagtaaccatgcatcatcaggagtacggataaaatgcttgatggtcggaagaggcataaattccgtcagccagtttagtctgaccatctcatctgtaacatcattggcaacgctacctttgccatgtttcagaaacaactctggcgcatcgggcttcccatacaatcgatagattgtcgcacctgattgcccgacattatcgcgagcccatttatacccatataaatcagcatccatgttggaatttaatcgcggcctagagcaagacgtttcccgttgaatatggctcatactcttcctttttcaatattattgaagcatttatcagggttattgtctcatgagcggatacatatttgaatgtatttagaaaaataaacaaataggggttccgcgcacatttccccgaaaagtgccacctgacgtctaagaaaccattattatcatgacattaacctataaaaataggcgtatcacgaggccctttcgtc

SEQ ID NO: 55 - DNA, 4717 bp, Artificial Sequence
  pLMTB8250
tcgcgcgtttcggtgatgacggtgaaaacctctgacacatgcagctcccggagacggtcacagcttgtctgtaagcggatgccgggagcagacaagcccgtcagggcgcgtcagcgggtgttggcgggtgtcggggctggcttaactatgcggcatcagagcagattgtactgagagtgcaccatatgcggtgtgaaataccgcacagatgcgtaaggagaaaataccgcatcaggcgccattcgccattcaggctgcgcaactgttgggaagggcgatcggtgcgggcctcttcgctattacgccagctggcgaaagggggatgtgctgcaaggcgattaagttgggtaacgccagggttttcccagtcacgacgttgtaaaacgacggccagtgaattgacgcgtattgggatatttaaatgcgcgcagcgcacagccgtcttctcccgcctccgcgtgccgccttactgggtactgcgcacgtccgtcgtgcgaccatcaagatacgatccccacggcaaggttaaggccccccgctcgtgtctctttcctctgccgtggactgcctctcgtcccgtttctccgtcttcctttgccccacctccccgagcgacggcggtggcgtgcggtagggcgacgtgctgggctgccatcccccctagcctctgcactccccagctctactgccgatctgcagtcacgtgcccgtcgcctccccgctgcccactggcccaacgcgctctccgcccacctctcctcgcactcccttcctgcttcctccttctacacattcgccagcgcccccatcctgcccccccccctctacgcacacccacactcacgcgcacaccgccgtgcacaagtcctcgtcctagctaccacgaaccatacagtccacagcacccctgcgccccgagagtcatggtccgcaagaagggatctctgatcctgtgtggggcgtttctgttcgtggcctggaacgcgctcttgctcctttttttgtggggccgcccgcccattggtcgactcggcgagggtgggggggcggagccgggcgcgggcgaggagtggggtgcggggaagagcaaagtgggtggcgctaacggcctggcgggtgaggttatccgcctggcggaggaggtcgagagtgagctggagacgcagaagaagcttctgaaacagatacagtcgcaccgcgagctttgggaacagcgtaaggaactggagaagcgtgaaagcgaggataccaaggacgagaagattgacgttgagcctaagaagccccgccagatcccggccgtgcacctgtcccacaaggtggtggaagacgcccagacagtaaccaagaaaatgcaaacgctgatggtgacaccgcctcagctggtgatgaaggagcaggagacagatcagaagaataagcagatgatggaggaccagctggggctcaccacgccatctccgcaaatcatcatcccgattctcgtgatcgcgtgcgatcgcgtgaccgtgaagcggtccctcgaccgtctgatccagtaccggccaagcgcagagttgtacccaattatcgtcagccaggattgtggccacgctgacacagcccgcgtgatcgggtcctatggcagccagatcacgcacataagccagcctgaccttgcagatataccggtgcggccagatcatcgcaagtttcaggggtactacaagatcgcccgccattaccgttgggcgctcaaccaggtgttcaacgtgtttgcctactcaacggtggtgatagtcgaggacgacctggaggtggcgcctgacttcttcgagtactttcgagctctctatccgatcttgcgctcagatcctaccttgtggtgcatttcggcttggaacgataacgggcgtgatggtctcgtggatcccgggaaggccgagctcctctaccgcacggacttctttcctggactgggttggatgttgcttaaggaggtgtgggcggaactcgaacccaagtggccaaaggcgttctgggacgactggatgcgacacccggagcagcgtaaaaatcgctcttgcatccgaccggaaattagtcggacgatcacattcggtcgtaaaggtgtgtccttggggcagttcttcgaccagtatctccgttacattaagctcaacactgaattcgtccctttcacgaagcacgacctcagctatcttgtgcgagagaagtacgatgttagctttgaaaaagatgtatactcggctcccctcgtaaaggtagaggagctgcagcacggcggcagccttaagggcagcggccccttccgagtacagtactcgagccgagacagtttcaaggtccttgcccgcaacctcggggtgatggatgacctgaagtcaggcgtgccacgcgccggttaccgcggcgtggtctcgttcatatctcgcggccggcgcatctacctcgcgccccctgagggttggacgaaatacgacgtgagctggagctaaatttaaatatcccaatggcgcgccgagcttggctcgagcatggtcatagctgtttcctgtgtgaaattgttatccgctcacaattccacacaacatacgagccggaagcataaagtgtaaagcctggggtgcctaatgagtgagctaactcacattaattgcgttgcgctcactgcccgctttccagtcgggaaacctgtcgtgccagctgcattaatgaatcggccaacgcgcggggagaggcggtttgcgtattgggcgctcttccgcttcctcgctcactgactcgctgcgctcggtcgttcggctgcggcgagcggtatcagctcactcaaaggcggtaatacggttatccacagaatcaggggataacgcaggaaagaacatgtgagcaaaaggccagcaaaaggccaggaaccgtaaaaaggccgcgttgctggcgtttttccataggctccgcccccctgacgagcatcacaaaaatcgacgctcaagtcagaggtggcgaaacccgacaggactataaagataccaggcgtttccccctggaagctccctcgtgcgctctcctgttccgaccctgccgcttaccggatacctgtccgcctttctcccttcgggaagcgtggcgctttctcatagctcacgctgtaggtatctcagttcggtgtaggtcgttcgctccaagctgggctgtgtgcacgaaccccccgttcagcccgaccgctgcgccttatccggtaactatcgtcttgagtccaacccggtaagacacgacttatcgccactggcagcagccactggtaacaggattagcagagcgaggtatgtaggcggtgctacagagttcttgaagtggtggcctaactacggctacactagaagaacagtatttggtatctgcgctctgctgaagccagttaccttcggaaaaagagttggtagctcttgatccggcaaacaaaccaccgctggtagcggtggtttttttgtttgcaagcagcagattacgcgcagaaaaaaaggatctcaagaagatcctttgatcttttctacggggtctgacgctcagtggaacgaaaactcacgttaagggattttggtcatgagattatcaaaaaggatcttcacctagatccttttaaattaaaaatgaagttttaaatcaatctaaagtatatatgagtaaacttggtctgacagttagaaaaactcatcgagcatcaaatgaaactgcaatttattcatatcaggattatcaataccatatttttgaaaaagccgtttctgtaatgaaggagaaaactcaccgaggcagttccataggatggcaagatcctggtatcggtctgcgattccgactcgtccaacatcaatacaacctattaatttcccctcgtcaaaaataaggttatcaagtgagaaatcaccatgagtgacgactgaatccggtgagaatggcaaaagtttatgcatttctttccagacttgttcaacaggccagccattacgctcgtcatcaaaatcactcgcatcaaccaaaccgttattcattcgtgattgcgcctgagcgagacgaaatacgcgatcgctgttaaaaggacaattacaaacaggaatcgaatgcaaccggcgcaggaacactgccagcgcatcaacaatattttcacctgaatcaggatattcttctaatacctggaatgctgttttcccagggatcgcagtggtgagtaaccatgcatcatcaggagtacggataaaatgcttgatggtcggaagaggcataaattccgtcagccagtttagtctgaccatctcatctgtaacatcattggcaacgctacctttgccatgtttcagaaacaactctggcgcatcgggcttcccatacaatcgatagattgtcgcacctgattgcccgacattatcgcgagcccatttatacccatataaatcagcatccatgttggaatttaatcgcggcctagagcaagacgtttcccgttgaatatggctcatactcttcctttttcaatattattgaagcatttatcagggttattgtctcatgagcggatacatatttgaatgtatttagaaaaataaacaaataggggttccgcgcacatttccccgaaaagtgccacctgacgtctaagaaaccattattatcatgacattaacctataaaaataggcgtatcacgaggccctttcgtc

SEQ ID NO: 56 - DNA, 4480 bp, Artificial Sequence
  pLMTB8253
tcgcgcgtttcggtgatgacggtgaaaacctctgacacatgcagctcccggagacggtcacagcttgtctgtaagcggatgccgggagcagacaagcccgtcagggcgcgtcagcgggtgttggcgggtgtcggggctggcttaactatgcggcatcagagcagattgtactgagagtgcaccatatgcggtgtgaaataccgcacagatgcgtaaggagaaaataccgcatcaggcgccattcgccattcaggctgcgcaactgttgggaagggcgatcggtgcgggcctcttcgctattacgccagctggcgaaagggggatgtgctgcaaggcgattaagttgggtaacgccagggttttcccagtcacgacgttgtaaaacgacggccagtgaattgacgcgtattgggatatttaaatagtggtgcgcgtgcgtgtctccgctgtctggagctccttccctgccacgcaactgcgagccttcacggcggcccacccgcccgcacacgggagcggagactgtgcgtgtgtgcgtgtgtgcgtgtggagcgggtaatgtcggcacacacacacacacacacacacacacacatgcacgctgagagaatgagcagccccagaggagaacatggggctcatgcgcgcagacggaagggcacacacgaggaggggcacacccctctgtcttcagggagcacggccctgctgctgccatgtgacgggcgtctgccacgcgactcttccccacaccttgctcctttcctccctcccctcctggcgcacacgaaacacgcgcgatgcacacacgcacgcgcccaccccccaaaataaataaaatgaaacgcgcagctcttcgctctcgttcttcgaacaaacacatctaaacccccttccaacccctctttcttcttttttcaaccatgcggtttcggatctacaagcgcaaggtattgattcttactctcgtggtggcggcgtgcggctttgtgctgtggtctagcaatggccggcagcgtaagaatgacgcgttggctccgccgctgttggacagcgagccgcttcgcggggcgggccattttgccgcttcggtgggcatccgtcgtgtgtctaacgattcagccgcgccgctcgtgccggccgtccctcgtccggaggtggacaacctcaccttgcgataccgcagcctggtctaccaactcaatttcgaccagatgctgcgcaacgtagataaggacgggacatggtcgcccggcgagctggtactggtcgtgcaggtgcacaatcgtccagagtacctgcggctcctgatcgactcactgcgcaaggctcagggcatccgggaggtgctggtgatcttttctcacgacttctggtccgctgagattaacagcctgataagctctgtggacttttgcccagtacttcaggtattctttccattcagcattcagctgtacccctccgagtttccgggtagtgacccgcgcgattgcccgcgcgatctcaaaaagaatgccgcattgaagttgggctgcatcaatgcggagtatccagacagcttcggccactaccgtgaggccaagttctctcagacgaaacaccattggtggtggaagttgcatttcgtctgggagcgcgtgaaggtcctgcaggattacacaggcctgattctgttccttgaggaggatcactacctggcgcccgacttctaccatgtgttcaagaagatgtggaagctgaaacaacaagagtgccctggttgtgatgtgctcagtctcgggacctacaccaccattcgtagtttctacggcatcgctgacaaggtggacgtgaagacatggaaatcgacagagcacaacatgggtctggcattgacacgggatgcgtatcagaagctgattgagtgcaccgacacattctgcacgtacgacgattataactgggactggacgctgcagtaccttacgctggcgtgccttccgaaggtatggaaggtcctggtgccgcaggccccgcgaatcttccacgcgggtgattgcggcatgcaccacaagaagacgtgccgcccttccactcagtcagcccagatcgaaagcctgctcaataacaacaaacagtacctcttcccagaaaccctcgtgatcggcgagaagttccctatggcggcgatctccccgccccgtaagaacggggggtggggcgacatacgtgatcatgagctctgtaagtcgtatcgccgcctccaagctggggcctagatttaaatatcccaatggcgcgccgagcttggctcgagcatggtcatagctgtttcctgtgtgaaattgttatccgctcacaattccacacaacatacgagccggaagcataaagtgtaaagcctggggtgcctaatgagtgagctaactcacattaattgcgttgcgctcactgcccgctttccagtcgggaaacctgtcgtgccagctgcattaatgaatcggccaacgcgcggggagaggcggtttgcgtattgggcgctcttccgcttcctcgctcactgactcgctgcgctcggtcgttcggctgcggcgagcggtatcagctcactcaaaggcggtaatacggttatccacagaatcaggggataacgcaggaaagaacatgtgagcaaaaggccagcaaaaggccaggaaccgtaaaaaggccgcgttgctggcgtttttccataggctccgcccccctgacgagcatcacaaaaatcgacgctcaagtcagaggtggcgaaacccgacaggactataaagataccaggcgtttccccctggaagctccctcgtgcgctctcctgttccgaccctgccgcttaccggatacctgtccgcctttctcccttcgggaagcgtggcgctttctcatagctcacgctgtaggtatctcagttcggtgtaggtcgttcgctccaagctgggctgtgtgcacgaaccccccgttcagcccgaccgctgcgccttatccggtaactatcgtcttgagtccaacccggtaagacacgacttatcgccactggcagcagccactggtaacaggattagcagagcgaggtatgtaggcggtgctacagagttcttgaagtggtggcctaactacggctacactagaagaacagtatttggtatctgcgctctgctgaagccagttaccttcggaaaaagagttggtagctcttgatccggcaaacaaaccaccgctggtagcggtggtttttttgtttgcaagcagcagattacgcgcagaaaaaaaggatctcaagaagatcctttgatcttttctacggggtctgacgctcagtggaacgaaaactcacgttaagggattttggtcatgagattatcaaaaaggatcttcacctagatccttttaaattaaaaatgaagttttaaatcaatctaaagtatatatgagtaaacttggtctgacagttagaaaaactcatcgagcatcaaatgaaactgcaatttattcatatcaggattatcaataccatatttttgaaaaagccgtttctgtaatgaaggagaaaactcaccgaggcagttccataggatggcaagatcctggtatcggtctgcgattccgactcgtccaacatcaatacaacctattaatttcccctcgtcaaaaataaggttatcaagtgagaaatcaccatgagtgacgactgaatccggtgagaatggcaaaagtttatgcatttctttccagacttgttcaacaggccagccattacgctcgtcatcaaaatcactcgcatcaaccaaaccgttattcattcgtgattgcgcctgagcgagacgaaatacgcgatcgctgttaaaaggacaattacaaacaggaatcgaatgcaaccggcgcaggaacactgccagcgcatcaacaatattttcacctgaatcaggatattcttctaatacctggaatgctgttttcccagggatcgcagtggtgagtaaccatgcatcatcaggagtacggataaaatgcttgatggtcggaagaggcataaattccgtcagccagtttagtctgaccatctcatctgtaacatcattggcaacgctacctttgccatgtttcagaaacaactctggcgcatcgggcttcccatacaatcgatagattgtcgcacctgattgcccgacattatcgcgagcccatttatacccatataaatcagcatccatgttggaatttaatcgcggcctagagcaagacgtttcccgttgaatatggctcatactcttcctttttcaatattattgaagcatttatcagggttattgtctcatgagcggatacatatttgaatgtatttagaaaaataaacaaataggggttccgcgcacatttccccgaaaagtgccacctgacgtctaagaaaccattattatcatgacattaacctataaaaataggcgtatcacgaggccctttcgtc

SEQ ID NO: 57 - DNA, 4039 bp, Artificial Sequence
  pLMTB8255
tcgcgcgtttcggtgatgacggtgaaaacctctgacacatgcagctcccggagacggtcacagcttgtctgtaagcggatgccgggagcagacaagcccgtcagggcgcgtcagcgggtgttggcgggtgtcggggctggcttaactatgcggcatcagagcagattgtactgagagtgcaccatatgcggtgtgaaataccgcacagatgcgtaaggagaaaataccgcatcaggcgccattcgccattcaggctgcgcaactgttgggaagggcgatcggtgcgggcctcttcgctattacgccagctggcgaaagggggatgtgctgcaaggcgattaagttgggtaacgccagggttttcccagtcacgacgttgtaaaacgacggccagtgaattgacgcgtattgggatatttaaatatgcgcctccgagaacccctgctgagcggatcagccgcgatgccgggtgcctccctccaacgcgcctgtcgcctccttgtggcggtatgcgcactgcaccttggtgtaacactggtctactacctggccgggcgggaccttagccggctcccgcaattggtcggtgtgtcgaccccactgcagggtggctccaattcagcggccgctataggccagtcgtctggcgagttgcgaacaggtggcgcgcgccccccgccaccgttgggcgccagctctcagccgcgccccggtggcgattcaagcccagtggttgacagcggcccgggcccagctagcaacctgacatcggtcccggtgcctcacacgaccgcgctgtccctccccgcatgcccggaggagagcccactccttgtgggccccatgctcatcgagttcaacatgcccgtagatctcgagctcgtggctaagcagaaccccaacgtcaagatgggtggacgctatgcaccgcgagactgtgttagcccacacaaggtggctatcatcattccgttccgcaaccgccaggagcatctgaagtactggctgtactacctgcaccccgtgctccagcggcagcagctggactacggtatctacgtaatcaaccaggcgggcgacaccatcttcaatcgcgcaaagcttcttaacgtcggttttcaggaggctctcaaggactatgactacacctgcttcgtgttctcggacgtcgacctcattccaatgaacgaccacaacgcgtaccgctgcttttcccagccccgccacatctcagttgcaatggataagttcgggttctcgctcccctacgttcagtactttggtggtgtgtccgccctcagcaagcaacagtttctgacaatcaatggctttccgaacaactactggggctggggcggcgaggacgacgacattttcaaccgattggtgttccgcggaatgtctatctctcgtcccaacgcggtcgtagggcgatgccgaatgatacgacattcgcgggataagaagaatgagccgaatccgcagcgctttgaccggatcgcccataccaaggagacgatgctgagcgacggactgaatagtctcacctaccaggtactcgacgtgcagcgctacccactgtatacgcagatcacggtagacatcggaacgccgagctgattagcgctccgtagctcgctgcgtatgagaggtactgagctccaatgcatcacacggcgtacggcaacacacactatcttttcagtttatttttttaattatccctccaaaaagaagcaactgacacttcaaaatattcccaacaaggagcgtgaggtcagtgaccagtctcggacttcacaccgcgcatgtagaagcacatttaaatatcccaatggcgcgccgagcttggctcgagcatggtcatagctgtttcctgtgtgaaattgttatccgctcacaattccacacaacatacgagccggaagcataaagtgtaaagcctggggtgcctaatgagtgagctaactcacattaattgcgttgcgctcactgcccgctttccagtcgggaaacctgtcgtgccagctgcattaatgaatcggccaacgcgcggggagaggcggtttgcgtattgggcgctcttccgcttcctcgctcactgactcgctgcgctcggtcgttcggctgcggcgagcggtatcagctcactcaaaggcggtaatacggttatccacagaatcaggggataacgcaggaaagaacatgtgagcaaaaggccagcaaaaggccaggaaccgtaaaaaggccgcgttgctggcgtttttccataggctccgcccccctgacgagcatcacaaaaatcgacgctcaagtcagaggtggcgaaacccgacaggactataaagataccaggcgtttccccctggaagctccctcgtgcgctctcctgttccgaccctgccgcttaccggatacctgtccgcctttctcccttcgggaagcgtggcgctttctcatagctcacgctgtaggtatctcagttcggtgtaggtcgttcgctccaagctgggctgtgtgcacgaaccccccgttcagcccgaccgctgcgccttatccggtaactatcgtcttgagtccaacccggtaagacacgacttatcgccactggcagcagccactggtaacaggattagcagagcgaggtatgtaggcggtgctacagagttcttgaagtggtggcctaactacggctacactagaagaacagtatttggtatctgcgctctgctgaagccagttaccttcggaaaaagagttggtagctcttgatccggcaaacaaaccaccgctggtagcggtggtttttttgtttgcaagcagcagattacgcgcagaaaaaaaggatctcaagaagatcctttgatcttttctacggggtctgacgctcagtggaacgaaaactcacgttaagggattttggtcatgagattatcaaaaaggatcttcacctagatccttttaaattaaaaatgaagttttaaatcaatctaaagtatatatgagtaaacttggtctgacagttagaaaaactcatcgagcatcaaatgaaactgcaatttattcatatcaggattatcaataccatatttttgaaaaagccgtttctgtaatgaaggagaaaactcaccgaggcagttccataggatggcaagatcctggtatcggtctgcgattccgactcgtccaacatcaatacaacctattaatttcccctcgtcaaaaataaggttatcaagtgagaaatcaccatgagtgacgactgaatccggtgagaatggcaaaagtttatgcatttctttccagacttgttcaacaggccagccattacgctcgtcatcaaaatcactcgcatcaaccaaaccgttattcattcgtgattgcgcctgagcgagacgaaatacgcgatcgctgttaaaaggacaattacaaacaggaatcgaatgcaaccggcgcaggaacactgccagcgcatcaacaatattttcacctgaatcaggatattcttctaatacctggaatgctgttttcccagggatcgcagtggtgagtaaccatgcatcatcaggagtacggataaaatgcttgatggtcggaagaggcataaattccgtcagccagtttagtctgaccatctcatctgtaacatcattggcaacgctacctttgccatgtttcagaaacaactctggcgcatcgggcttcccatacaatcgatagattgtcgcacctgattgcccgacattatcgcgagcccatttatacccatataaatcagcatccatgttggaatttaatcgcggcctagagcaagacgtttcccgttgaatatggctcatactcttcctttttcaatattattgaagcatttatcagggttattgtctcatgagcggatacatatttgaatgtatttagaaaaataaacaaataggggttccgcgcacatttccccgaaaagtgccacctgacgtctaagaaaccattattatcatgacattaacctataaaaataggcgtatcacgaggccctttcgtc

SEQ ID NO: 58 - DNA, 3548 bp, Artificial Sequence
  pLMTB8259
tcgcgcgtttcggtgatgacggtgaaaacctctgacacatgcagctcccggagacggtcacagcttgtctgtaagcggatgccgggagcagacaagcccgtcagggcgcgtcagcgggtgttggcgggtgtcggggctggcttaactatgcggcatcagagcagattgtactgagagtgcaccatatgcggtgtgaaataccgcacagatgcgtaaggagaaaataccgcatcaggcgccattcgccattcaggctgcgcaactgttgggaagggcgatcggtgcgggcctcttcgctattacgccagctggcgaaagggggatgtgctgcaaggcgattaagttgggtaacgccagggttttcccagtcacgacgttgtaaaacgacggccagtgaattgacgcgtattgggatatttaaatttagcgctccgtagctcgctgcgtatgagaggtactgagctccaatgcatcacacggcgtacggcaacacacactatcttttcagtttatttttttaattatccctccaaaaagaagcaactgacacttcaaaatattcccaacaaggagcgtgaggtcagtgaccagtctcggacttcacaccgcgcatgtagaagcacgcggcttgcgcgccaggcttcttttggcaaaccacgctgcacagaatgtctgtgtacagcagccaggctgtgatcgatctattatgctcgcccctcgctcctccggcattctcgagtccatgtcgagcttgtctggctccgtgcacatgcaagcgtttgtgcgcgcctctaatgtaaccacacgtcaaaacattgtgtgtcttccgaagtgggagacaccggggccaccaactccggtggtttacagcctcctccctcaaccaacgctgccgattgtaccacctttcattgcgtctttgtgcccctccctatcttcatgtttccactgcgcttcgtttccgaatactattttcgtgtactgtttcatcactttctcacaacagctcttttttttcacccgcagaagatggccaagcctttgtctcaagaagaatccaccctcattgaaagagcaacggctacaatcaacagcatccccatctctgaagactacagcgtcgccagcgcagctctctctagcgacggccgcatcttcactggtgtcaatgtatatcattttactgggggaccttgtgcagaactcgtggtgctgggcactgctgctgctgcggcagctggcaacctgacttgtatcgtcgcgatcggaaatgagaacaggggcatcttgagcccctgcggacggtgccgacaggtgcttctcgatctgatttaaatatcccaatggcgcgccgagcttggctcgagcatggtcatagctgtttcctgtgtgaaattgttatccgctcacaattccacacaacatacgagccggaagcataaagtgtaaagcctggggtgcctaatgagtgagctaactcacattaattgcgttgcgctcactgcccgctttccagtcgggaaacctgtcgtgccagctgcattaatgaatcggccaacgcgcggggagaggcggtttgcgtattgggcgctcttccgcttcctcgctcactgactcgctgcgctcggtcgttcggctgcggcgagcggtatcagctcactcaaaggcggtaatacggttatccacagaatcaggggataacgcaggaaagaacatgtgagcaaaaggccagcaaaaggccaggaaccgtaaaaaggccgcgttgctggcgtttttccataggctccgcccccctgacgagcatcacaaaaatcgacgctcaagtcagaggtggcgaaacccgacaggactataaagataccaggcgtttccccctggaagctccctcgtgcgctctcctgttccgaccctgccgcttaccggatacctgtccgcctttctcccttcgggaagcgtggcgctttctcatagctcacgctgtaggtatctcagttcggtgtaggtcgttcgctccaagctgggctgtgtgcacgaaccccccgttcagcccgaccgctgcgccttatccggtaactatcgtcttgagtccaacccggtaagacacgacttatcgccactggcagcagccactggtaacaggattagcagagcgaggtatgtaggcggtgctacagagttcttgaagtggtggcctaactacggctacactagaagaacagtatttggtatctgcgctctgctgaagccagttaccttcggaaaaagagttggtagctcttgatccggcaaacaaaccaccgctggtagcggtggtttttttgtttgcaagcagcagattacgcgcagaaaaaaaggatctcaagaagatcctttgatcttttctacggggtctgacgctcagtggaacgaaaactcacgttaagggattttggtcatgagattatcaaaaaggatcttcacctagatccttttaaattaaaaatgaagttttaaatcaatctaaagtatatatgagtaaacttggtctgacagttagaaaaactcatcgagcatcaaatgaaactgcaatttattcatatcaggattatcaataccatatttttgaaaaagccgtttctgtaatgaaggagaaaactcaccgaggcagttccataggatggcaagatcctggtatcggtctgcgattccgactcgtccaacatcaatacaacctattaatttcccctcgtcaaaaataaggttatcaagtgagaaatcaccatgagtgacgactgaatccggtgagaatggcaaaagtttatgcatttctttccagacttgttcaacaggccagccattacgctcgtcatcaaaatcactcgcatcaaccaaaccgttattcattcgtgattgcgcctgagcgagacgaaatacgcgatcgctgttaaaaggacaattacaaacaggaatcgaatgcaaccggcgcaggaacactgccagcgcatcaacaatattttcacctgaatcaggatattcttctaatacctggaatgctgttttcccagggatcgcagtggtgagtaaccatgcatcatcaggagtacggataaaatgcttgatggtcggaagaggcataaattccgtcagccagtttagtctgaccatctcatctgtaacatcattggcaacgctacctttgccatgtttcagaaacaactctggcgcatcgggcttcccatacaatcgatagattgtcgcacctgattgcccgacattatcgcgagcccatttatacccatataaatcagcatccatgttggaatttaatcgcggcctagagcaagacgtttcccgttgaatatggctcatactcttcctttttcaatattattgaagcatttatcagggttattgtctcatgagcggatacatatttgaatgtatttagaaaaataaacaaataggggttccgcgcacatttccccgaaaagtgccacctgacgtctaagaaaccattattatcatgacattaacctataaaaataggcgtatcacgaggccctttcgtc

SEQ ID NO: 59 - DNA, 3961 bp, Artificial Sequence
  pLMTB8282
tcgcgcgtttcggtgatgacggtgaaaacctctgacacatgcagctcccggagacggtcacagcttgtctgtaagcggatgccgggagcagacaagcccgtcagggcgcgtcagcgggtgttggcgggtgtcggggctggcttaactatgcggcatcagagcagattgtactgagagtgcaccatatgcggtgtgaaataccgcacagatgcgtaaggagaaaataccgcatcaggcgccattcgccattcaggctgcgcaactgttgggaagggcgatcggtgcgggcctcttcgctattacgccagctggcgaaagggggatgtgctgcaaggcgattaagttgggtaacgccagggttttcccagtcacgacgttgtaaaacgacggccagtgaattgacgcgtattgggatatttaaatggtagactcgtgccgcgcgctgatgatgtaggtgcacgcgtgcgtgtgctgcagcggagccgccgccaccgcgactgtgtgtgtgtgcgcgcgtgacgaccggctcgaggaaggaggagcgcgcgtgtgcgtgcgatgcgcctcctctttttttttcgccctcgtcggtttttttttttctgagaggacggcggcggcggatggcggggcggcggcgctgacggagcggccacgctctgcacctccccgccctccgccgtctctccgttcgccgtcctctccttcctcgtgcgtgcgtctgccgcgcatgcacacgcgcgcgcgttgccgtagcgctgtgtatctgtggaggagggccttgtctctccctccccgtcgctgagagatgaaggggcaaaaagagagagcagtgcgcatgtgtgcctccgctccctggagctccccacgagccccctgcgccacgcacctgcgaacctgcacagcggcccacctgcccgcacacgtgagcagaaatgggtgtgtggagcgggtgatgtcggcgcgcacacgcgcgcgcgctgaccactccgacgtgaaaacacggaagagcgaggctggcaaggcagggcaggaacctgatcacgtgcgcgcgcacaaacggaatgagcagctcctgaagaggagatggggctcatgcacgcagacacgcacgtgcacactcctccgtcttcacggagcgcggccctgctgctgctgccatgtgccggacgtctgccacgcgtctcttccccacaccttgctcttcccccccccccttccctcccggcgaacacaaaacacgcgcacgcccaccgaaacaacaacgcgcagctcttcgctctcgttcttcgaacaaacacctttaaaccgccttccaacccctctttcttctttttcagccatgaccgagtacaagccgaccgtgcgcctggcgacacgcgacgacgtgccacgcgcagtgcgcacactggcggcagcgtttgcggactacccggcgacacgccacacagtggacccggaccgccacatcgagcgcgtgacagagctgcaggagctgttcctgacgcgcgtgggcctggacatcggcaaggtctgggtggcagacgacggcgcagcggtggcagtgtggacgacaccagagagcgtcgaggcaggcgcggtgttcgcagagattggcccacgcatggcggagctgagcggcagccgcctggcagcacagcagcagatggagggcctgctggcaccgcaccgcccaaaggagccagcctggtttctggcgacagtgggcgtgtccccggaccatttaaatatcccaatggcgcgccgagcttggctcgagcatggtcatagctgtttcctgtgtgaaattgttatccgctcacaattccacacaacatacgagccggaagcataaagtgtaaagcctggggtgcctaatgagtgagctaactcacattaattgcgttgcgctcactgcccgctttccagtcgggaaacctgtcgtgccagctgcattaatgaatcggccaacgcgcggggagaggcggtttgcgtattgggcgctcttccgcttcctcgctcactgactcgctgcgctcggtcgttcggctgcggcgagcggtatcagctcactcaaaggcggtaatacggttatccacagaatcaggggataacgcaggaaagaacatgtgagcaaaaggccagcaaaaggccaggaaccgtaaaaaggccgcgttgctggcgtttttccataggctccgcccccctgacgagcatcacaaaaatcgacgctcaagtcagaggtggcgaaacccgacaggactataaagataccaggcgtttccccctggaagctccctcgtgcgctctcctgttccgaccctgccgcttaccggatacctgtccgcctttctcccttcgggaagcgtggcgctttctcatagctcacgctgtaggtatctcagttcggtgtaggtcgttcgctccaagctgggctgtgtgcacgaaccccccgttcagcccgaccgctgcgccttatccggtaactatcgtcttgagtccaacccggtaagacacgacttatcgccactggcagcagccactggtaacaggattagcagagcgaggtatgtaggcggtgctacagagttcttgaagtggtggcctaactacggctacactagaagaacagtatttggtatctgcgctctgctgaagccagttaccttcggaaaaagagttggtagctcttgatccggcaaacaaaccaccgctggtagcggtggtttttttgtttgcaagcagcagattacgcgcagaaaaaaaggatctcaagaagatcctttgatcttttctacggggtctgacgctcagtggaacgaaaactcacgttaagggattttggtcatgagattatcaaaaaggatcttcacctagatccttttaaattaaaaatgaagttttaaatcaatctaaagtatatatgagtaaacttggtctgacagttagaaaaactcatcgagcatcaaatgaaactgcaatttattcatatcaggattatcaataccatatttttgaaaaagccgtttctgtaatgaaggagaaaactcaccgaggcagttccataggatggcaagatcctggtatcggtctgcgattccgactcgtccaacatcaatacaacctattaatttcccctcgtcaaaaataaggttatcaagtgagaaatcaccatgagtgacgactgaatccggtgagaatggcaaaagtttatgcatttctttccagacttgttcaacaggccagccattacgctcgtcatcaaaatcactcgcatcaaccaaaccgttattcattcgtgattgcgcctgagcgagacgaaatacgcgatcgctgttaaaaggacaattacaaacaggaatcgaatgcaaccggcgcaggaacactgccagcgcatcaacaatattttcacctgaatcaggatattcttctaatacctggaatgctgttttcccagggatcgcagtggtgagtaaccatgcatcatcaggagtacggataaaatgcttgatggtcggaagaggcataaattccgtcagccagtttagtctgaccatctcatctgtaacatcattggcaacgctacctttgccatgtttcagaaacaactctggcgcatcgggcttcccatacaatcgatagattgtcgcacctgattgcccgacattatcgcgagcccatttatacccatataaatcagcatccatgttggaatttaatcgcggcctagagcaagacgtttcccgttgaatatggctcatactcttcctttttcaatattattgaagcatttatcagggttattgtctcatgagcggatacatatttgaatgtatttagaaaaataaacaaataggggttccgcgcacatttccccgaaaagtgccacctgacgtctaagaaaccattattatcatgacattaacctataaaaataggcgtatcacgaggccctttcgtc

SEQ ID NO: 60 - DNA, 3677 bp, Artificial Sequence
  pLMTB8285
tcgcgcgtttcggtgatgacggtgaaaacctctgacacatgcagctcccggagacggtcacagcttgtctgtaagcggatgccgggagcagacaagcccgtcagggcgcgtcagcgggtgttggcgggtgtcggggctggcttaactatgcggcatcagagcagattgtactgagagtgcaccatatgcggtgtgaaataccgcacagatgcgtaaggagaaaataccgcatcaggcgccattcgccattcaggctgcgcaactgttgggaagggcgatcggtgcgggcctcttcgctattacgccagctggcgaaagggggatgtgctgcaaggcgattaagttgggtaacgccagggttttcccagtcacgacgttgtaaaacgacggccagtgaattgacgcgtattgggatatttaaatcagtcgtcggtcgctgccgtatgatccgacattctcgtgataagaagaacgagcctaacccacagcgcttcgaccgaatcgctcatactaaggaaacgatgctctccgacgggctcaactctctcacataccaggtcctcgacgtgcagcgctatccactttacacgcagattacggtcgacatcggcaccccgtcgtgagtcctccggcttgacagcgcacacgcgccgctgtatgtgcgcgtgcgcgcgggtcccgactggggccggcgatgaggcgcatcatacctccatagagaccctattttttgttttatggcttctcagatgaccacttggtttcttccttccttcgtttggtttgtttatctcctccccttcgttgagggtacgagtcagggtaggctcggacaaaacttaccgcacccgcgatgggccacagctgtctatcgctctcgctctctcggtctcctgaccgggacaggttgtcgccccgtcacgcgtaccggcgtgcgcgcccgctcttgcgccctgccccaccattcgtcgaatgatgcgcgacgcgcatgacaggcgctgctgcagcactgctccctgcggttgctgagtgcgtacatggcgttgctactgatgtgtttgcactgcatctcacctcgctctcttcacgcatccgctcgcccttcttccctcttcacgagactgcgtcggtcttttggtgctgctgtggcgcagcccgccgccttccactccccccaaacacacacgttcatacgtccacacagcactcgtgcgcaccgacacacccacaccccctcctctctctcctctccccaaccatgcgtttccgaatttacaagcgtaaggtgctgatcctcacccttgtcgtcgctgcgtgcggttttgtgctttggagctcgaacgggcgacagcgtaagaacgacgcgcttgcaccaccgctcctggattccgagccgctccgcggcgcggggcatttcgcagctagcgtagggatccggcgtgtgagtaacgacagcgcatttaaatatcccaatggcgcgccgagcttggctcgagcatggtcatagctgtttcctgtgtgaaattgttatccgctcacaattccacacaacatacgagccggaagcataaagtgtaaagcctggggtgcctaatgagtgagctaactcacattaattgcgttgcgctcactgcccgctttccagtcgggaaacctgtcgtgccagctgcattaatgaatcggccaacgcgcggggagaggcggtttgcgtattgggcgctcttccgcttcctcgctcactgactcgctgcgctcggtcgttcggctgcggcgagcggtatcagctcactcaaaggcggtaatacggttatccacagaatcaggggataacgcaggaaagaacatgtgagcaaaaggccagcaaaaggccaggaaccgtaaaaaggccgcgttgctggcgtttttccataggctccgcccccctgacgagcatcacaaaaatcgacgctcaagtcagaggtggcgaaacccgacaggactataaagataccaggcgtttccccctggaagctccctcgtgcgctctcctgttccgaccctgccgcttaccggatacctgtccgcctttctcccttcgggaagcgtggcgctttctcatagctcacgctgtaggtatctcagttcggtgtaggtcgttcgctccaagctgggctgtgtgcacgaaccccccgttcagcccgaccgctgcgccttatccggtaactatcgtcttgagtccaacccggtaagacacgacttatcgccactggcagcagccactggtaacaggattagcagagcgaggtatgtaggcggtgctacagagttcttgaagtggtggcctaactacggctacactagaagaacagtatttggtatctgcgctctgctgaagccagttaccttcggaaaaagagttggtagctcttgatccggcaaacaaaccaccgctggtagcggtggtttttttgtttgcaagcagcagattacgcgcagaaaaaaaggatctcaagaagatcctttgatcttttctacggggtctgacgctcagtggaacgaaaactcacgttaagggattttggtcatgagattatcaaaaaggatcttcacctagatccttttaaattaaaaatgaagttttaaatcaatctaaagtatatatgagtaaacttggtctgacagttagaaaaactcatcgagcatcaaatgaaactgcaatttattcatatcaggattatcaataccatatttttgaaaaagccgtttctgtaatgaaggagaaaactcaccgaggcagttccataggatggcaagatcctggtatcggtctgcgattccgactcgtccaacatcaatacaacctattaatttcccctcgtcaaaaataaggttatcaagtgagaaatcaccatgagtgacgactgaatccggtgagaatggcaaaagtttatgcatttctttccagacttgttcaacaggccagccattacgctcgtcatcaaaatcactcgcatcaaccaaaccgttattcattcgtgattgcgcctgagcgagacgaaatacgcgatcgctgttaaaaggacaattacaaacaggaatcgaatgcaaccggcgcaggaacactgccagcgcatcaacaatattttcacctgaatcaggatattcttctaatacctggaatgctgttttcccagggatcgcagtggtgagtaaccatgcatcatcaggagtacggataaaatgcttgatggtcggaagaggcataaattccgtcagccagtttagtctgaccatctcatctgtaacatcattggcaacgctacctttgccatgtttcagaaacaactctggcgcatcgggcttcccatacaatcgatagattgtcgcacctgattgcccgacattatcgcgagcccatttatacccatataaatcagcatccatgttggaatttaatcgcggcctagagcaagacgtttcccgttgaatatggctcatactcttcctttttcaatattattgaagcatttatcagggttattgtctcatgagcggatacatatttgaatgtatttagaaaaataaacaaataggggttccgcgcacatttccccgaaaagtgccacctgacgtctaagaaaccattattatcatgacattaacctataaaaataggcgtatcacgaggccctttcgtc

SEQ ID NO: 61 - DNA, 3661 bp, Artificial Sequence
  pLMTB8286
tcgcgcgtttcggtgatgacggtgaaaacctctgacacatgcagctcccggagacggtcacagcttgtctgtaagcggatgccgggagcagacaagcccgtcagggcgcgtcagcgggtgttggcgggtgtcggggctggcttaactatgcggcatcagagcagattgtactgagagtgcaccatatgcggtgtgaaataccgcacagatgcgtaaggagaaaataccgcatcaggcgccattcgccattcaggctgcgcaactgttgggaagggcgatcggtgcgggcctcttcgctattacgccagctggcgaaagggggatgtgctgcaaggcgattaagttgggtaacgccagggttttcccagtcacgacgttgtaaaacgacggccagtgaattgacgcgtattgggatatttaaatcatgccgcccttccacccagagcgctcaaattgagtcgctgctcaataacaacaaacagtaccttttcccggagacactcgtaataggggaaaagtttccaatggcggctatctctcccccacgcaagaatggtggctggggcgatatacgcgaccatgagctgtgtaaaagttaccggcgcctgcaagccggcgcctaggcctgtgtgctgcctcctcatttccggcggctcgcacgcgctcgcatgcttcgccacacagacgtcctcgtgtctactgaacagctaacggatttccatgtcatttctcgtttcccatcttcaaacacaagagcaccactgcaacgtcagcagtgaacgcccaacactgcggagagcgtggtcacgccccttctgacttgcaccatgaaaaacgatgtgaggcagcggcgcgtcctctctcccgttcgctgacttgccccacgcgagtatctgcgcgccggcacccctctccgcagctcggtttgcctgcaggtgtgcgctctcgatacctcccgcctctgtcattctgtttgtctcttcctcccagctccactcttcttcttttcctgcttctccgtttgtttgtgcggcgcagtgccgcgaccagcacattttggctctctctccgttgctagcaccaggggtcgggatcgacgtgcgcgttgctcctccgctctccccattttcatctccttattctgctttgttttgcaaactcgccggcgaacgctgtcaaatcttcacgggttgtttttctctcttcctctctcgtggaacgccggcgtgccaagacgaggccatgctgaagaagagctcgctcgtgctgtggggtgtggtactgttcgtggcatggaacgcccttatcttgttcttcctgtggactcgaccgcaaagcctctccgatcacagccatctcacggaggaggtgattcggcttgcgcaggatgccgagtctgaattggagcgtcagaaggacctgttgcagcagatctaccgttaatttaaatatcccaatggcgcgccgagcttggctcgagcatggtcatagctgtttcctgtgtgaaattgttatccgctcacaattccacacaacatacgagccggaagcataaagtgtaaagcctggggtgcctaatgagtgagctaactcacattaattgcgttgcgctcactgcccgctttccagtcgggaaacctgtcgtgccagctgcattaatgaatcggccaacgcgcggggagaggcggtttgcgtattgggcgctcttccgcttcctcgctcactgactcgctgcgctcggtcgttcggctgcggcgagcggtatcagctcactcaaaggcggtaatacggttatccacagaatcaggggataacgcaggaaagaacatgtgagcaaaaggccagcaaaaggccaggaaccgtaaaaaggccgcgttgctggcgtttttccataggctccgcccccctgacgagcatcacaaaaatcgacgctcaagtcagaggtggcgaaacccgacaggactataaagataccaggcgtttccccctggaagctccctcgtgcgctctcctgttccgaccctgccgcttaccggatacctgtccgcctttctcccttcgggaagcgtggcgctttctcatagctcacgctgtaggtatctcagttcggtgtaggtcgttcgctccaagctgggctgtgtgcacgaaccccccgttcagcccgaccgctgcgccttatccggtaactatcgtcttgagtccaacccggtaagacacgacttatcgccactggcagcagccactggtaacaggattagcagagcgaggtatgtaggcggtgctacagagttcttgaagtggtggcctaactacggctacactagaagaacagtatttggtatctgcgctctgctgaagccagttaccttcggaaaaagagttggtagctcttgatccggcaaacaaaccaccgctggtagcggtggtttttttgtttgcaagcagcagattacgcgcagaaaaaaaggatctcaagaagatcctttgatcttttctacggggtctgacgctcagtggaacgaaaactcacgttaagggattttggtcatgagattatcaaaaaggatcttcacctagatccttttaaattaaaaatgaagttttaaatcaatctaaagtatatatgagtaaacttggtctgacagttagaaaaactcatcgagcatcaaatgaaactgcaatttattcatatcaggattatcaataccatatttttgaaaaagccgtttctgtaatgaaggagaaaactcaccgaggcagttccataggatggcaagatcctggtatcggtctgcgattccgactcgtccaacatcaatacaacctattaatttcccctcgtcaaaaataaggttatcaagtgagaaatcaccatgagtgacgactgaatccggtgagaatggcaaaagtttatgcatttctttccagacttgttcaacaggccagccattacgctcgtcatcaaaatcactcgcatcaaccaaaccgttattcattcgtgattgcgcctgagcgagacgaaatacgcgatcgctgttaaaaggacaattacaaacaggaatcgaatgcaaccggcgcaggaacactgccagcgcatcaacaatattttcacctgaatcaggatattcttctaatacctggaatgctgttttcccagggatcgcagtggtgagtaaccatgcatcatcaggagtacggataaaatgcttgatggtcggaagaggcataaattccgtcagccagtttagtctgaccatctcatctgtaacatcattggcaacgctacctttgccatgtttcagaaacaactctggcgcatcgggcttcccatacaatcgatagattgtcgcacctgattgcccgacattatcgcgagcccatttatacccatataaatcagcatccatgttggaatttaatcgcggcctagagcaagacgtttcccgttgaatatggctcatactcttcctttttcaatattattgaagcatttatcagggttattgtctcatgagcggatacatatttgaatgtatttagaaaaataaacaaataggggttccgcgcacatttccccgaaaagtgccacctgacgtctaagaaaccattattatcatgacattaacctataaaaataggcgtatcacgaggccctttcgtc

SEQ ID NO: 62 - DNA, 3854 bp, Artificial Sequence
  pLMTB8287
tcgcgcgtttcggtgatgacggtgaaaacctctgacacatgcagctcccggagacggtcacagcttgtctgtaagcggatgccgggagcagacaagcccgtcagggcgcgtcagcgggtgttggcgggtgtcggggctggcttaactatgcggcatcagagcagattgtactgagagtgcaccatatgcggtgtgaaataccgcacagatgcgtaaggagaaaataccgcatcaggcgccattcgccattcaggctgcgcaactgttgggaagggcgatcggtgcgggcctcttcgctattacgccagctggcgaaagggggatgtgctgcaaggcgattaagttgggtaacgccagggttttcccagtcacgacgttgtaaaacgacggccagtgaattgacgcgtattgggatatttaaatgctgggcacggtgcgagtgcagtacacaactcgcgactccttcaaggcgttcgctaaggcgctgggtgtcatggacgaccttaagtccggtgtgccgcgtgccggttaccgtggcatcgtttcgtttctctatcagagccgccgggtctatctggccccgccttccgactggacaggatacgatcccagctggagctagttcctttcacctatacacgtggttcatatattatcggctttttacctgagagagcaaagaaagcttattagcacggaaaaacgtaatgtgctgataggggaaagaaacaaaaacaaccgcagccgagacattttgtttgtgttggaggaagtagaggaggcccatcggtgtctagaagacaataccgcagtgtgagacagtgacagaggtggcagaggagaggtagggggaagctcaaatgagtgctgtatcatgtatgcatgtctctctggctgcttctcagcttttcgttccggcttccactggactgtggccctgctccaaaccttcgacgtgggatgattcgatgactctttcttttatcagtgactgataccgatactgtgctgcagagaatcgagaaaaaaagcggaaaaggcggcagggcctcgatggcaaatcgtttagttgtgtgtgtcagtgatgcctctctaggtggcggagtggggctgcacgtgatggacgacgacgtagcgcaatacgcgccttcagtcgacagatcgaacaagcaccgtgctggtttcagtatccctgcgcactctcctggttatgggcgccttgaatgcgagcctttgtttgagctccacttgctgctcatcaaatggccacacttccgacctcccttgctctttttttttgcacttttgtggcacctgtgtccttgctgtcggtcctttccaacttcagcacacggagaaaccaccctgactgtagcaatcacgatccagtggggacaaaggagacgaggtgtcgagtgccatttcgacgatcggaatgcgaccacgtaagaccatactgctcgtgggtgtcctggtgatatgggtgcttatgacctaccttgcctttatgcggagcgttcggggcacagacgggtcgcgcccacgcccggctttcgccagtaataagctcatgctcgagaaggtacaggatttcgagcagaacctgaagtcgttcgccgacagccgtcagaatctatttaaatatcccaatggcgcgccgagcttggctcgagcatggtcatagctgtttcctgtgtgaaattgttatccgctcacaattccacacaacatacgagccggaagcataaagtgtaaagcctggggtgcctaatgagtgagctaactcacattaattgcgttgcgctcactgcccgctttccagtcgggaaacctgtcgtgccagctgcattaatgaatcggccaacgcgcggggagaggcggtttgcgtattgggcgctcttccgcttcctcgctcactgactcgctgcgctcggtcgttcggctgcggcgagcggtatcagctcactcaaaggcggtaatacggttatccacagaatcaggggataacgcaggaaagaacatgtgagcaaaaggccagcaaaaggccaggaaccgtaaaaaggccgcgttgctggcgtttttccataggctccgcccccctgacgagcatcacaaaaatcgacgctcaagtcagaggtggcgaaacccgacaggactataaagataccaggcgtttccccctggaagctccctcgtgcgctctcctgttccgaccctgccgcttaccggatacctgtccgcctttctcccttcgggaagcgtggcgctttctcatagctcacgctgtaggtatctcagttcggtgtaggtcgttcgctccaagctgggctgtgtgcacgaaccccccgttcagcccgaccgctgcgccttatccggtaactatcgtcttgagtccaacccggtaagacacgacttatcgccactggcagcagccactggtaacaggattagcagagcgaggtatgtaggcggtgctacagagttcttgaagtggtggcctaactacggctacactagaagaacagtatttggtatctgcgctctgctgaagccagttaccttcggaaaaagagttggtagctcttgatccggcaaacaaaccaccgctggtagcggtggtttttttgtttgcaagcagcagattacgcgcagaaaaaaaggatctcaagaagatcctttgatcttttctacggggtctgacgctcagtggaacgaaaactcacgttaagggattttggtcatgagattatcaaaaaggatcttcacctagatccttttaaattaaaaatgaagttttaaatcaatctaaagtatatatgagtaaacttggtctgacagttagaaaaactcatcgagcatcaaatgaaactgcaatttattcatatcaggattatcaataccatatttttgaaaaagccgtttctgtaatgaaggagaaaactcaccgaggcagttccataggatggcaagatcctggtatcggtctgcgattccgactcgtccaacatcaatacaacctattaatttcccctcgtcaaaaataaggttatcaagtgagaaatcaccatgagtgacgactgaatccggtgagaatggcaaaagtttatgcatttctttccagacttgttcaacaggccagccattacgctcgtcatcaaaatcactcgcatcaaccaaaccgttattcattcgtgattgcgcctgagcgagacgaaatacgcgatcgctgttaaaaggacaattacaaacaggaatcgaatgcaaccggcgcaggaacactgccagcgcatcaacaatattttcacctgaatcaggatattcttctaatacctggaatgctgttttcccagggatcgcagtggtgagtaaccatgcatcatcaggagtacggataaaatgcttgatggtcggaagaggcataaattccgtcagccagtttagtctgaccatctcatctgtaacatcattggcaacgctacctttgccatgtttcagaaacaactctggcgcatcgggcttcccatacaatcgatagattgtcgcacctgattgcccgacattatcgcgagcccatttatacccatataaatcagcatccatgttggaatttaatcgcggcctagagcaagacgtttcccgttgaatatggctcatactcttcctttttcaatattattgaagcatttatcagggttattgtctcatgagcggatacatatttgaatgtatttagaaaaataaacaaataggggttccgcgcacatttccccgaaaagtgccacctgacgtctaagaaaccattattatcatgacattaacctataaaaataggcgtatcacgaggccctttcgtc

SEQ ID NO: 63 - DNA, 4039 bp, Artificial Sequence
  pLMTB8295
tcgcgcgtttcggtgatgacggtgaaaacctctgacacatgcagctcccggagacggtcacagcttgtctgtaagcggatgccgggagcagacaagcccgtcagggcgcgtcagcgggtgttggcgggtgtcggggctggcttaactatgcggcatcagagcagattgtactgagagtgcaccatatgcggtgtgaaataccgcacagatgcgtaaggagaaaataccgcatcaggcgccattcgccattcaggctgcgcaactgttgggaagggcgatcggtgcgggcctcttcgctattacgccagctggcgaaagggggatgtgctgcaaggcgattaagttgggtaacgccagggttttcccagtcacgacgttgtaaaacgacggccagtgaattgacgcgtattgggatatttaaatatgcgcctgcgtgagcctcttttgtcaggatcggcggctatgcccggagccagtctccagcgggcctgccggttgctcgttgccgtctgcgcgttgcacctgggggtcaccctggtctactacctggctggccgtgacctttcccgcttgccgcagttggtcggtgtatccaccccgctccaggggggctcgaacagcgcagcggcgataggacagtcttcgggcgagctgcgaaccggcggagcgcgcccacccccacccctgggcgcgagttcccagccccgcccgggtggtgacagctcgccggtggtagattcaggaccagggcccgccagtaacctcacgtcagtgccagtaccccacaccacggctttgagcctgcctgcttgcccggaggagagtcctctgcttgtaggaccaatgttgattgaatttaacatgcctgtggacctggagctggtggcgaagcagaatccaaacgtgaaaatgggcggtcggtacgcgcctcgcgattgcgtctcaccgcacaaggtagcgattataataccctttcgcaaccgacaagaacacctgaagtactggctctactatctccaccctgtcctgcagcgccagcagctggactacggcatttacgtgatcaaccaggcgggcgatactatctttaaccgtgcgaagctcctcaatgtagggtttcaggaggctctgaaggactacgactacacatgctttgtctttagcgacgtggatctcattccaatgaatgaccataacgcctaccgctgcttttcccagccgcgccatatctctgtggccatggacaagttcggcttctcgctgccatacgtgcagtacttcggaggcgtgtctgcactgagtaagcaacagttcctgaccattaacggcttccccaacaactattggggctggggcggggaagacgatgacatctttaaccggctggtcttccgaggtatgagcatttcgcgcccaaacgccgtcgtgggacgctgccggatgatacgacacagccgagacaaaaagaacgagcctaatccgcagcgcttcgaccgcatagctcacacgaaggagactatgttgagcgacggcctcaatagcttgacgtatcaggttttggatgtgcagcgttacccactgtacacacagatcactgtggatatcggtacgccttcttaatcagcgttccgtagcgcgctgcacatccggtactgcgttccagcgcatcacgcgacgcacagcaacacaaattttcgttttgtttctcttccattcgaaaaaaaaaagataacacccaccccacttaacctccataacaagagagcgtgagaggagagtctgctcttggccttcacaccgcaaatgcagcaaaacgcggcatttaaatatcccaatggcgcgccgagcttggctcgagcatggtcatagctgtttcctgtgtgaaattgttatccgctcacaattccacacaacatacgagccggaagcataaagtgtaaagcctggggtgcctaatgagtgagctaactcacattaattgcgttgcgctcactgcccgctttccagtcgggaaacctgtcgtgccagctgcattaatgaatcggccaacgcgcggggagaggcggtttgcgtattgggcgctcttccgcttcctcgctcactgactcgctgcgctcggtcgttcggctgcggcgagcggtatcagctcactcaaaggcggtaatacggttatccacagaatcaggggataacgcaggaaagaacatgtgagcaaaaggccagcaaaaggccaggaaccgtaaaaaggccgcgttgctggcgtttttccataggctccgcccccctgacgagcatcacaaaaatcgacgctcaagtcagaggtggcgaaacccgacaggactataaagataccaggcgtttccccctggaagctccctcgtgcgctctcctgttccgaccctgccgcttaccggatacctgtccgcctttctcccttcgggaagcgtggcgctttctcatagctcacgctgtaggtatctcagttcggtgtaggtcgttcgctccaagctgggctgtgtgcacgaaccccccgttcagcccgaccgctgcgccttatccggtaactatcgtcttgagtccaacccggtaagacacgacttatcgccactggcagcagccactggtaacaggattagcagagcgaggtatgtaggcggtgctacagagttcttgaagtggtggcctaactacggctacactagaagaacagtatttggtatctgcgctctgctgaagccagttaccttcggaaaaagagttggtagctcttgatccggcaaacaaaccaccgctggtagcggtggtttttttgtttgcaagcagcagattacgcgcagaaaaaaaggatctcaagaagatcctttgatcttttctacggggtctgacgctcagtggaacgaaaactcacgttaagggattttggtcatgagattatcaaaaaggatcttcacctagatccttttaaattaaaaatgaagttttaaatcaatctaaagtatatatgagtaaacttggtctgacagttagaaaaactcatcgagcatcaaatgaaactgcaatttattcatatcaggattatcaataccatatttttgaaaaagccgtttctgtaatgaaggagaaaactcaccgaggcagttccataggatggcaagatcctggtatcggtctgcgattccgactcgtccaacatcaatacaacctattaatttcccctcgtcaaaaataaggttatcaagtgagaaatcaccatgagtgacgactgaatccggtgagaatggcaaaagtttatgcatttctttccagacttgttcaacaggccagccattacgctcgtcatcaaaatcactcgcatcaaccaaaccgttattcattcgtgattgcgcctgagcgagacgaaatacgcgatcgctgttaaaaggacaattacaaacaggaatcgaatgcaaccggcgcaggaacactgccagcgcatcaacaatattttcacctgaatcaggatattcttctaatacctggaatgctgttttcccagggatcgcagtggtgagtaaccatgcatcatcaggagtacggataaaatgcttgatggtcggaagaggcataaattccgtcagccagtttagtctgaccatctcatctgtaacatcattggcaacgctacctttgccatgtttcagaaacaactctggcgcatcgggcttcccatacaatcgatagattgtcgcacctgattgcccgacattatcgcgagcccatttatacccatataaatcagcatccatgttggaatttaatcgcggcctagagcaagacgtttcccgttgaatatggctcatactcttcctttttcaatattattgaagcatttatcagggttattgtctcatgagcggatacatatttgaatgtatttagaaaaataaacaaataggggttccgcgcacatttccccgaaaagtgccacctgacgtctaagaaaccattattatcatgacattaacctataaaaataggcgtatcacgaggccctttcgtc

SEQ ID NO: 64 - DNA, 3848 bp, Artificial Sequence
  pLMTB8297
tcgcgcgtttcggtgatgacggtgaaaacctctgacacatgcagctcccggagacggtcacagcttgtctgtaagcggatgccgggagcagacaagcccgtcagggcgcgtcagcgggtgttggcgggtgtcggggctggcttaactatgcggcatcagagcagattgtactgagagtgcaccatatgcggtgtgaaataccgcacagatgcgtaaggagaaaataccgcatcaggcgccattcgccattcaggctgcgcaactgttgggaagggcgatcggtgcgggcctcttcgctattacgccagctggcgaaagggggatgtgctgcaaggcgattaagttgggtaacgccagggttttcccagtcacgacgttgtaaaacgacggccagtgaattgacgcgtattgggatatttaaattcagcgttccgtagcgcgctgcacatccggtactgcgttccagcgcatcacgcgacgcacagcaacacaaattttcgttttgtttctcttccattcgaaaaaaaaaagataacacccaccccacttaacctccataacaagagagcgtgagaggagagtctgctcttggccttcacaccgcaaatgcagcaaaacgcggcttgtacgcaacgcatctcttagcacgtcaagctaagcagaatctttgcgtacggcaaccaggctctcatcgacccgtcgttcgctcctcgctcctccggcattcttgagccacgacgcgtatgcttggctccgtgcgtctgcgagcgtttgtgcgtttctcaaatacaagccgaggggccaccacgtttatctttgccgctcgacgcacctccttcaactacatgtacttacgacccctcgatctaaaaacctctgcccatcgcatcacttctcattctgtcgttgtgcctctttctaccttcatctttcgcttgtgctttctttcctaatacccttctcgtgtaatccctcatcacttttcctctacagctcgtttcgttcccttgccgaaaatgaaaaagcctgaactcaccgcgacgtctgtcgagaagtttctgatcgaaaagttcgacagcgtctccgacctgatgcagctctcggagggcgaagaatctcgtgctttcagcttcgatgtaggagggcgtggatatgtcctgcgggtaaatagctgcgccgatggtttctacaaagatcgttatgtttatcggcactttgcatcggccgcgctcccgattccggaagtgcttgacattggggaattcagcgagagcctgacctattgcatctcccgccgtgcacagggtgtcacgttgcaagacctgcctgaaaccgaactgcccgctgttctgcagccggtcgcggaggcgatggatgcgatcgctgcggccgatcttagccagacgagcgggttcggcccattcggaccgcaaggaatcggtcaatacactacatggcgtgatttcatatgcgcgattgctgatccccatgtgtatcactggcaaactgtgatggacgacaccgtcagtgcgtccgtcgcgcaggctctcgatgagctgatgctttgggccgaggactgccccgaagtccggcacctcgtgcacgcggatttcggctccaacaatgtccatttaaatatcccaatggcgcgccgagcttggctcgagcatggtcatagctgtttcctgtgtgaaattgttatccgctcacaattccacacaacatacgagccggaagcataaagtgtaaagcctggggtgcctaatgagtgagctaactcacattaattgcgttgcgctcactgcccgctttccagtcgggaaacctgtcgtgccagctgcattaatgaatcggccaacgcgcggggagaggcggtttgcgtattgggcgctcttccgcttcctcgctcactgactcgctgcgctcggtcgttcggctgcggcgagcggtatcagctcactcaaaggcggtaatacggttatccacagaatcaggggataacgcaggaaagaacatgtgagcaaaaggccagcaaaaggccaggaaccgtaaaaaggccgcgttgctggcgtttttccataggctccgcccccctgacgagcatcacaaaaatcgacgctcaagtcagaggtggcgaaacccgacaggactataaagataccaggcgtttccccctggaagctccctcgtgcgctctcctgttccgaccctgccgcttaccggatacctgtccgcctttctcccttcgggaagcgtggcgctttctcatagctcacgctgtaggtatctcagttcggtgtaggtcgttcgctccaagctgggctgtgtgcacgaaccccccgttcagcccgaccgctgcgccttatccggtaactatcgtcttgagtccaacccggtaagacacgacttatcgccactggcagcagccactggtaacaggattagcagagcgaggtatgtaggcggtgctacagagttcttgaagtggtggcctaactacggctacactagaagaacagtatttggtatctgcgctctgctgaagccagttaccttcggaaaaagagttggtagctcttgatccggcaaacaaaccaccgctggtagcggtggtttttttgtttgcaagcagcagattacgcgcagaaaaaaaggatctcaagaagatcctttgatcttttctacggggtctgacgctcagtggaacgaaaactcacgttaagggattttggtcatgagattatcaaaaaggatcttcacctagatccttttaaattaaaaatgaagttttaaatcaatctaaagtatatatgagtaaacttggtctgacagttagaaaaactcatcgagcatcaaatgaaactgcaatttattcatatcaggattatcaataccatatttttgaaaaagccgtttctgtaatgaaggagaaaactcaccgaggcagttccataggatggcaagatcctggtatcggtctgcgattccgactcgtccaacatcaatacaacctattaatttcccctcgtcaaaaataaggttatcaagtgagaaatcaccatgagtgacgactgaatccggtgagaatggcaaaagtttatgcatttctttccagacttgttcaacaggccagccattacgctcgtcatcaaaatcactcgcatcaaccaaaccgttattcattcgtgattgcgcctgagcgagacgaaatacgcgatcgctgttaaaaggacaattacaaacaggaatcgaatgcaaccggcgcaggaacactgccagcgcatcaacaatattttcacctgaatcaggatattcttctaatacctggaatgctgttttcccagggatcgcagtggtgagtaaccatgcatcatcaggagtacggataaaatgcttgatggtcggaagaggcataaattccgtcagccagtttagtctgaccatctcatctgtaacatcattggcaacgctacctttgccatgtttcagaaacaactctggcgcatcgggcttcccatacaatcgatagattgtcgcacctgattgcccgacattatcgcgagcccatttatacccatataaatcagcatccatgttggaatttaatcgcggcctagagcaagacgtttcccgttgaatatggctcatactcttcctttttcaatattattgaagcatttatcagggttattgtctcatgagcggatacatatttgaatgtatttagaaaaataaacaaataggggttccgcgcacatttccccgaaaagtgccacctgacgtctaagaaaccattattatcatgacattaacctataaaaataggcgtatcacgaggccctttcgtc

SEQ ID NO: 65 - DNA, 3997 bp, Artificial Sequence
  pLMTB8301
tcgcgcgtttcggtgatgacggtgaaaacctctgacacatgcagctcccggagacggtcacagcttgtctgtaagcggatgccgggagcagacaagcccgtcagggcgcgtcagcgggtgttggcgggtgtcggggctggcttaactatgcggcatcagagcagattgtactgagagtgcaccatatgcggtgtgaaataccgcacagatgcgtaaggagaaaataccgcatcaggcgccattcgccattcaggctgcgcaactgttgggaagggcgatcggtgcgggcctcttcgctattacgccagctggcgaaagggggatgtgctgcaaggcgattaagttgggtaacgccagggttttcccagtcacgacgttgtaaaacgacggccagtgaattgacgcgtattgggatatttaaatgcagcggccccttccgagtacagtactcgagccgagacagtttcaaggtccttgcccgcaacctcggggtgatggatgacctgaagtcaggcgtgccacgcgccggttaccgcggcgtggtctcgttcatatctcgcggccggcgcatctacctcgcgccccctgagggttggacgaaatacgacgtgagctggagctaatgaactgcctgtcgcaacgaccacggccctctcgctttcccttggttggttcgtcaaacggctgaaccggcttctcttcctctgtcgctccttgtcctcatttctgtttcacacgacatacttgtctattatgtcgctgcctgtatgtgtgtgtgtgtgtgctgcaatgacgggtagggggctgaggcggcaaggtaagcaggggcgccgaggcacgggtagaggccaaaggcaggcgtcggcgatgatggaccttcctcgactttcttcgttgtggtcttatctttgctcgtttcaattcttgttttcatttctcgtcgtctgaaaagaaaggcaaaaaaaaacaaagaaggggcgcagaagagcgggatcgcgacgtgcgtacacgtatcgaggtcgcttcccttttttgcgaagtcttttcgacctctcgtacacatctttcgtgggctgttgtgcaccatgttcagcgcgcgacgtcgagctgtgctcgcttcctgcaatgacttcccgcccttcgtctttgtcttccactggaagagtgtggcacttcactcgccagtgatgaggggaagggggagcggaccaacaccgtcttttttatagcgataaggaggtgaggaggtggtctgtgtggcgttcctcgtgatgataggcttcatggtcgacttacttaccgcgtgaggagcagcatatccatccacctccaagttcctcgaagaggtcaggaaacgccacttctcatgccccgccagtctcttgtgtaaccttcgtccctcttattcttcatctcactcatccgtgcctcgttgaccacttcaccgtaacccgctccctccctttcaatctctcctgccccccccccccccacacacacactatcgctcactcgcgcccctttgttcgtgtttccctccctatcatatgcgtgcgcattccataaagtgttgcaatcatgcggttccggatttacaagcgcaaagtggtcatcttgaccctcgtcgtgattatatgcggttttgcagtgtggaacagtggcaaaccgaagaaggccagcacggtgtttccgaaagaggtggagacagtgaagcgcagtagtgtgggcagccaaatccaggcgaccattcctgtcacgcggaagccgatcaacgagtcatttaaatatcccaatggcgcgccgagcttggctcgagcatggtcatagctgtttcctgtgtgaaattgttatccgctcacaattccacacaacatacgagccggaagcataaagtgtaaagcctggggtgcctaatgagtgagctaactcacattaattgcgttgcgctcactgcccgctttccagtcgggaaacctgtcgtgccagctgcattaatgaatcggccaacgcgcggggagaggcggtttgcgtattgggcgctcttccgcttcctcgctcactgactcgctgcgctcggtcgttcggctgcggcgagcggtatcagctcactcaaaggcggtaatacggttatccacagaatcaggggataacgcaggaaagaacatgtgagcaaaaggccagcaaaaggccaggaaccgtaaaaaggccgcgttgctggcgtttttccataggctccgcccccctgacgagcatcacaaaaatcgacgctcaagtcagaggtggcgaaacccgacaggactataaagataccaggcgtttccccctggaagctccctcgtgcgctctcctgttccgaccctgccgcttaccggatacctgtccgcctttctcccttcgggaagcgtggcgctttctcatagctcacgctgtaggtatctcagttcggtgtaggtcgttcgctccaagctgggctgtgtgcacgaaccccccgttcagcccgaccgctgcgccttatccggtaactatcgtcttgagtccaacccggtaagacacgacttatcgccactggcagcagccactggtaacaggattagcagagcgaggtatgtaggcggtgctacagagttcttgaagtggtggcctaactacggctacactagaagaacagtatttggtatctgcgctctgctgaagccagttaccttcggaaaaagagttggtagctcttgatccggcaaacaaaccaccgctggtagcggtggtttttttgtttgcaagcagcagattacgcgcagaaaaaaaggatctcaagaagatcctttgatcttttctacggggtctgacgctcagtggaacgaaaactcacgttaagggattttggtcatgagattatcaaaaaggatcttcacctagatccttttaaattaaaaatgaagttttaaatcaatctaaagtatatatgagtaaacttggtctgacagttagaaaaactcatcgagcatcaaatgaaactgcaatttattcatatcaggattatcaataccatatttttgaaaaagccgtttctgtaatgaaggagaaaactcaccgaggcagttccataggatggcaagatcctggtatcggtctgcgattccgactcgtccaacatcaatacaacctattaatttcccctcgtcaaaaataaggttatcaagtgagaaatcaccatgagtgacgactgaatccggtgagaatggcaaaagtttatgcatttctttccagacttgttcaacaggccagccattacgctcgtcatcaaaatcactcgcatcaaccaaaccgttattcattcgtgattgcgcctgagcgagacgaaatacgcgatcgctgttaaaaggacaattacaaacaggaatcgaatgcaaccggcgcaggaacactgccagcgcatcaacaatattttcacctgaatcaggatattcttctaatacctggaatgctgttttcccagggatcgcagtggtgagtaaccatgcatcatcaggagtacggataaaatgcttgatggtcggaagaggcataaattccgtcagccagtttagtctgaccatctcatctgtaacatcattggcaacgctacctttgccatgtttcagaaacaactctggcgcatcgggcttcccatacaatcgatagattgtcgcacctgattgcccgacattatcgcgagcccatttatacccatataaatcagcatccatgttggaatttaatcgcggcctagagcaagacgtttcccgttgaatatggctcatactcttcctttttcaatattattgaagcatttatcagggttattgtctcatgagcggatacatatttgaatgtatttagaaaaataaacaaataggggttccgcgcacatttccccgaaaagtgccacctgacgtctaagaaaccattattatcatgacattaacctataaaaataggcgtatcacgaggccctttcgtc

SEQ ID NO: 66 - DNA, 3387 bp, Artificial Sequence
  pLMTB8302
tcgcgcgtttcggtgatgacggtgaaaacctctgacacatgcagctcccggagacggtcacagcttgtctgtaagcggatgccgggagcagacaagcccgtcagggcgcgtcagcgggtgttggcgggtgtcggggctggcttaactatgcggcatcagagcagattgtactgagagtgcaccatatgcggtgtgaaataccgcacagatgcgtaaggagaaaataccgcatcaggcgccattcgccattcaggctgcgcaactgttgggaagggcgatcggtgcgggcctcttcgctattacgccagctggcgaaagggggatgtgctgcaaggcgattaagttgggtaacgccagggttttcccagtcacgacgttgtaaaacgacggccagtgaattgacgcgtattgggatatttaaatctgcatgccgagcggccagaagacaaagattgagaacgtgctccagaatagcggtaatcagctcttccctaagcagctcttgatcacgaagcgactgcccgcgtcgggggcgaagggcgtagccccccatgtgaagaacggcggttggggcgacatccgggaccacgaactgtgcaagtcttacctgcgccttcagtagcgagcgcgttgcctctgcgctggtgaacgtgcctgcgcacttacatctcagccgtgctttctgggaagaccttctgcgacgcggggcgctgtgctggtacagatggaaagatgtgcgccatcacggatgcatccttgcatggtgcgtgctcacgtgctcaccacagtttgtgtgtgtgtgtgtgtgagtgtgagtgtgagtgagagagagagtgtgtttcggcgcacctcccatccaacagtggcgtgaacggctttctctgtatgcgccctttcgttttaactctttctttttccgcctttgttttttgtgatttttgatgaactcaaacacaaaatgaacatccatgctgaagaagcagtccgccgggttggtgctgtggggcgcaataatctttgttggctggaacgcgctccttctgctttttttctggacccgccctgcccccggacgcctcccttcggacagcgctctcggggacgaccccgcaagccttacgcgtgaagtcattcacctggcagaggatgctgaggcggagcttgagcgatttaaatatcccaatggcgcgccgagcttggctcgagcatggtcatagctgtttcctgtgtgaaattgttatccgctcacaattccacacaacatacgagccggaagcataaagtgtaaagcctggggtgcctaatgagtgagctaactcacattaattgcgttgcgctcactgcccgctttccagtcgggaaacctgtcgtgccagctgcattaatgaatcggccaacgcgcggggagaggcggtttgcgtattgggcgctcttccgcttcctcgctcactgactcgctgcgctcggtcgttcggctgcggcgagcggtatcagctcactcaaaggcggtaatacggttatccacagaatcaggggataacgcaggaaagaacatgtgagcaaaaggccagcaaaaggccaggaaccgtaaaaaggccgcgttgctggcgtttttccataggctccgcccccctgacgagcatcacaaaaatcgacgctcaagtcagaggtggcgaaacccgacaggactataaagataccaggcgtttccccctggaagctccctcgtgcgctctcctgttccgaccctgccgcttaccggatacctgtccgcctttctcccttcgggaagcgtggcgctttctcatagctcacgctgtaggtatctcagttcggtgtaggtcgttcgctccaagctgggctgtgtgcacgaaccccccgttcagcccgaccgctgcgccttatccggtaactatcgtcttgagtccaacccggtaagacacgacttatcgccactggcagcagccactggtaacaggattagcagagcgaggtatgtaggcggtgctacagagttcttgaagtggtggcctaactacggctacactagaagaacagtatttggtatctgcgctctgctgaagccagttaccttcggaaaaagagttggtagctcttgatccggcaaacaaaccaccgctggtagcggtggtttttttgtttgcaagcagcagattacgcgcagaaaaaaaggatctcaagaagatcctttgatcttttctacggggtctgacgctcagtggaacgaaaactcacgttaagggattttggtcatgagattatcaaaaaggatcttcacctagatccttttaaattaaaaatgaagttttaaatcaatctaaagtatatatgagtaaacttggtctgacagttagaaaaactcatcgagcatcaaatgaaactgcaatttattcatatcaggattatcaataccatatttttgaaaaagccgtttctgtaatgaaggagaaaactcaccgaggcagttccataggatggcaagatcctggtatcggtctgcgattccgactcgtccaacatcaatacaacctattaatttcccctcgtcaaaaataaggttatcaagtgagaaatcaccatgagtgacgactgaatccggtgagaatggcaaaagtttatgcatttctttccagacttgttcaacaggccagccattacgctcgtcatcaaaatcactcgcatcaaccaaaccgttattcattcgtgattgcgcctgagcgagacgaaatacgcgatcgctgttaaaaggacaattacaaacaggaatcgaatgcaaccggcgcaggaacactgccagcgcatcaacaatattttcacctgaatcaggatattcttctaatacctggaatgctgttttcccagggatcgcagtggtgagtaaccatgcatcatcaggagtacggataaaatgcttgatggtcggaagaggcataaattccgtcagccagtttagtctgaccatctcatctgtaacatcattggcaacgctacctttgccatgtttcagaaacaactctggcgcatcgggcttcccatacaatcgatagattgtcgcacctgattgcccgacattatcgcgagcccatttatacccatataaatcagcatccatgttggaatttaatcgcggcctagagcaagacgtttcccgttgaatatggctcatactcttcctttttcaatattattgaagcatttatcagggttattgtctcatgagcggatacatatttgaatgtatttagaaaaataaacaaataggggttccgcgcacatttccccgaaaagtgccacctgacgtctaagaaaccattattatcatgacattaacctataaaaataggcgtatcacgaggccctttcgtc

SEQ ID NO: 67 - DNA, 3585 bp, Artificial Sequence
  pLMTB8303
tcgcgcgtttcggtgatgacggtgaaaacctctgacacatgcagctcccggagacggtcacagcttgtctgtaagcggatgccgggagcagacaagcccgtcagggcgcgtcagcgggtgttggcgggtgtcggggctggcttaactatgcggcatcagagcagattgtactgagagtgcaccatatgcggtgtgaaataccgcacagatgcgtaaggagaaaataccgcatcaggcgccattcgccattcaggctgcgcaactgttgggaagggcgatcggtgcgggcctcttcgctattacgccagctggcgaaagggggatgtgctgcaaggcgattaagttgggtaacgccagggttttcccagtcacgacgttgtaaaacgacggccagtgaattgacgcgtattgggatatttaaatgcttggcgaggtgcgtgtccagtatacgtcccgcgacagctttaaggcatttgctaaagccttgggtgtcatggatgatctgaagtctggcgtgccccgtgcaggctaccgtggaatcgtgaccttccagttccggggtcgccgggtccacctcgccccgccggagacctggaacggctacgacccgtcctggaattgaagcggcttgccggatgccgcgtgagtaggagggtggctgccgcaaacgctgacctcggcgactgcggcgtggcgctccccttctcctccttttccggcggtgtgtgtcatgcatctgcgtgactcctccctctcatagatgcaagtttttctttttgacccctccctgtttgacctgcagccacacggatcgctgtgcgacgtggacggtgcgtgctgaccgcagagcaaaacacaagacacattctgcaccgccgttggtgccacctgcggcctgcgacgccgccagtgatgcccatctcgccccgttgccctatacaccctgtgaagagaggcgccgcggtgccgacgccttctagcatctcttcctttcccgtgaccactgcatgcttcctcgctttgccttcctgccacgccggcttcctcaactttcccttccctcgccacctgctttttctcctcatgggttctgcggcagcttcccagcccaccttcgctatccagccactctcgctcttctacatctcccaccccctcacaccgccatgcgcctgcgtgagcctcttttgtcaggatcggcggctatgcccggagccagtctccagcgggcctgccggttgctcgttgccgtctgcgcgttgcacctgggggtcaccctggtctactacctggctggccgtgacctttcccgcttgccgcagttggtcggtgtatccaccccgctccaggggggctcgaacagcgcatttaaatatcccaatggcgcgccgagcttggctcgagcatggtcatagctgtttcctgtgtgaaattgttatccgctcacaattccacacaacatacgagccggaagcataaagtgtaaagcctggggtgcctaatgagtgagctaactcacattaattgcgttgcgctcactgcccgctttccagtcgggaaacctgtcgtgccagctgcattaatgaatcggccaacgcgcggggagaggcggtttgcgtattgggcgctcttccgcttcctcgctcactgactcgctgcgctcggtcgttcggctgcggcgagcggtatcagctcactcaaaggcggtaatacggttatccacagaatcaggggataacgcaggaaagaacatgtgagcaaaaggccagcaaaaggccaggaaccgtaaaaaggccgcgttgctggcgtttttccataggctccgcccccctgacgagcatcacaaaaatcgacgctcaagtcagaggtggcgaaacccgacaggactataaagataccaggcgtttccccctggaagctccctcgtgcgctctcctgttccgaccctgccgcttaccggatacctgtccgcctttctcccttcgggaagcgtggcgctttctcatagctcacgctgtaggtatctcagttcggtgtaggtcgttcgctccaagctgggctgtgtgcacgaaccccccgttcagcccgaccgctgcgccttatccggtaactatcgtcttgagtccaacccggtaagacacgacttatcgccactggcagcagccactggtaacaggattagcagagcgaggtatgtaggcggtgctacagagttcttgaagtggtggcctaactacggctacactagaagaacagtatttggtatctgcgctctgctgaagccagttaccttcggaaaaagagttggtagctcttgatccggcaaacaaaccaccgctggtagcggtggtttttttgtttgcaagcagcagattacgcgcagaaaaaaaggatctcaagaagatcctttgatcttttctacggggtctgacgctcagtggaacgaaaactcacgttaagggattttggtcatgagattatcaaaaaggatcttcacctagatccttttaaattaaaaatgaagttttaaatcaatctaaagtatatatgagtaaacttggtctgacagttagaaaaactcatcgagcatcaaatgaaactgcaatttattcatatcaggattatcaataccatatttttgaaaaagccgtttctgtaatgaaggagaaaactcaccgaggcagttccataggatggcaagatcctggtatcggtctgcgattccgactcgtccaacatcaatacaacctattaatttcccctcgtcaaaaataaggttatcaagtgagaaatcaccatgagtgacgactgaatccggtgagaatggcaaaagtttatgcatttctttccagacttgttcaacaggccagccattacgctcgtcatcaaaatcactcgcatcaaccaaaccgttattcattcgtgattgcgcctgagcgagacgaaatacgcgatcgctgttaaaaggacaattacaaacaggaatcgaatgcaaccggcgcaggaacactgccagcgcatcaacaatattttcacctgaatcaggatattcttctaatacctggaatgctgttttcccagggatcgcagtggtgagtaaccatgcatcatcaggagtacggataaaatgcttgatggtcggaagaggcataaattccgtcagccagtttagtctgaccatctcatctgtaacatcattggcaacgctacctttgccatgtttcagaaacaactctggcgcatcgggcttcccatacaatcgatagattgtcgcacctgattgcccgacattatcgcgagcccatttatacccatataaatcagcatccatgttggaatttaatcgcggcctagagcaagacgtttcccgttgaatatggctcatactcttcctttttcaatattattgaagcatttatcagggttattgtctcatgagcggatacatatttgaatgtatttagaaaaataaacaaataggggttccgcgcacatttccccgaaaagtgccacctgacgtctaagaaaccattattatcatgacattaacctataaaaataggcgtatcacgaggccctttcgtc

SEQ ID NO: 68 - DNA, 4039 bp, Artificial Sequence
  pLMTB8306
tcgcgcgtttcggtgatgacggtgaaaacctctgacacatgcagctcccggagacggtcacagcttgtctgtaagcggatgccgggagcagacaagcccgtcagggcgcgtcagcgggtgttggcgggtgtcggggctggcttaactatgcggcatcagagcagattgtactgagagtgcaccatatgcggtgtgaaataccgcacagatgcgtaaggagaaaataccgcatcaggcgccattcgccattcaggctgcgcaactgttgggaagggcgatcggtgcgggcctcttcgctattacgccagctggcgaaagggggatgtgctgcaaggcgattaagttgggtaacgccagggttttcccagtcacgacgttgtaaaacgacggccagtgaattgacgcgtattgggatatttaaatatgcgcctgcgtgagcctcttttgtcaggatcggcggctatgcccggagccagtctccagcgggcctgccggttgctcgttgccgtctgcgcgttgcacctgggggtcaccctggtctactacctggctggccgtgacctttcccgcttgccgcagttggtcggtgtatccaccccgctccaggggggctcgaacagcgcagcggcgataggacagtcttcgggcgagctgcgaaccggcggagcgcgcccacccccacccctgggcgcgagttcccagccccgcccgggtggtgacagctcgccggtggtagattcaggaccagggcccgccagtaacctcacgtcagtgccagtaccccacaccacggctttgagcctgcctgcttgcccggaggagagtcctctgcttgtaggaccaatgttgattgaatttaacatgcctgtggacctggagctggtggcgaagcagaatccaaacgtgaaaatgggcggtcggtacgcgcctcgcgattgcgtctcaccgcacaaggtagcgattataataccctttcgcaaccgacaagaacacctgaagtactggctctactatctccaccctgtcctgcagcgccagcagctggactacggcatttacgtgatcaaccaggcgggcgatactatctttaaccgtgcgaagctcctcaatgtagggtttcaggaggctctgaaggactacgactacacatgctttgtctttagcgacgtggatctcattccaatgaatgaccataacgcctaccgctgcttttcccagccgcgccatatctctgtggccatggacaagttcggcttctcgctgccatacgtgcagtacttcggaggcgtgtctgcactgagtaagcaacagttcctgaccattaacggcttccccaacaactattggggctggggcggggaagacgatgacatctttaaccggctggtcttccgaggtatgagcatttcgcgcccaaacgccgtcgtgggacgctgccggatgatacgacacagccgagacaaaaagaacgagcctaatccgcagcgcttcgaccgcatagctcacacgaaggagactatgttgagcgacggcctcaatagcttgacgtatcaggttttggatgtgcagcgttacccactgtacacacagatcactgtggatatcggtacgccttcttaaacctgtgcgccgctccctcatttccggcggctcgcacgcgctcgcatactttgccacacagacgtcctcgtgtctactgaacaactaacggatttccatgtcatttctcgtttatcatcttcaaacacaagagcacaactgcaacgtcagcagtgaacgcccgacacaatcggagagcgtggtcacgccccttctgacttatttaaatatcccaatggcgcgccgagcttggctcgagcatggtcatagctgtttcctgtgtgaaattgttatccgctcacaattccacacaacatacgagccggaagcataaagtgtaaagcctggggtgcctaatgagtgagctaactcacattaattgcgttgcgctcactgcccgctttccagtcgggaaacctgtcgtgccagctgcattaatgaatcggccaacgcgcggggagaggcggtttgcgtattgggcgctcttccgcttcctcgctcactgactcgctgcgctcggtcgttcggctgcggcgagcggtatcagctcactcaaaggcggtaatacggttatccacagaatcaggggataacgcaggaaagaacatgtgagcaaaaggccagcaaaaggccaggaaccgtaaaaaggccgcgttgctggcgtttttccataggctccgcccccctgacgagcatcacaaaaatcgacgctcaagtcagaggtggcgaaacccgacaggactataaagataccaggcgtttccccctggaagctccctcgtgcgctctcctgttccgaccctgccgcttaccggatacctgtccgcctttctcccttcgggaagcgtggcgctttctcatagctcacgctgtaggtatctcagttcggtgtaggtcgttcgctccaagctgggctgtgtgcacgaaccccccgttcagcccgaccgctgcgccttatccggtaactatcgtcttgagtccaacccggtaagacacgacttatcgccactggcagcagccactggtaacaggattagcagagcgaggtatgtaggcggtgctacagagttcttgaagtggtggcctaactacggctacactagaagaacagtatttggtatctgcgctctgctgaagccagttaccttcggaaaaagagttggtagctcttgatccggcaaacaaaccaccgctggtagcggtggtttttttgtttgcaagcagcagattacgcgcagaaaaaaaggatctcaagaagatcctttgatcttttctacggggtctgacgctcagtggaacgaaaactcacgttaagggattttggtcatgagattatcaaaaaggatcttcacctagatccttttaaattaaaaatgaagttttaaatcaatctaaagtatatatgagtaaacttggtctgacagttagaaaaactcatcgagcatcaaatgaaactgcaatttattcatatcaggattatcaataccatatttttgaaaaagccgtttctgtaatgaaggagaaaactcaccgaggcagttccataggatggcaagatcctggtatcggtctgcgattccgactcgtccaacatcaatacaacctattaatttcccctcgtcaaaaataaggttatcaagtgagaaatcaccatgagtgacgactgaatccggtgagaatggcaaaagtttatgcatttctttccagacttgttcaacaggccagccattacgctcgtcatcaaaatcactcgcatcaaccaaaccgttattcattcgtgattgcgcctgagcgagacgaaatacgcgatcgctgttaaaaggacaattacaaacaggaatcgaatgcaaccggcgcaggaacactgccagcgcatcaacaatattttcacctgaatcaggatattcttctaatacctggaatgctgttttcccagggatcgcagtggtgagtaaccatgcatcatcaggagtacggataaaatgcttgatggtcggaagaggcataaattccgtcagccagtttagtctgaccatctcatctgtaacatcattggcaacgctacctttgccatgtttcagaaacaactctggcgcatcgggcttcccatacaatcgatagattgtcgcacctgattgcccgacattatcgcgagcccatttatacccatataaatcagcatccatgttggaatttaatcgcggcctagagcaagacgtttcccgttgaatatggctcatactcttcctttttcaatattattgaagcatttatcagggttattgtctcatgagcggatacatatttgaatgtatttagaaaaataaacaaataggggttccgcgcacatttccccgaaaagtgccacctgacgtctaagaaaccattattatcatgacattaacctataaaaataggcgtatcacgaggccctttcgtc

SEQ ID NO: 69 - DNA, 3921 bp, Artificial Sequence
  pLMTB8307
tcgcgcgtttcggtgatgacggtgaaaacctctgacacatgcagctcccggagacggtcacagcttgtctgtaagcggatgccgggagcagacaagcccgtcagggcgcgtcagcgggtgttggcgggtgtcggggctggcttaactatgcggcatcagagcagattgtactgagagtgcaccatatgcggtgtgaaataccgcacagatgcgtaaggagaaaataccgcatcaggcgccattcgccattcaggctgcgcaactgttgggaagggcgatcggtgcgggcctcttcgctattacgccagctggcgaaagggggatgtgctgcaaggcgattaagttgggtaacgccagggttttcccagtcacgacgttgtaaaacgacggccagtgaattgacgcgtattgggatatttaaatacctgtgcgccgctccctcatttccggcggctcgcacgcgctcgcatactttgccacacagacgtcctcgtgtctactgaacaactaacggatttccatgtcatttctcgtttatcatcttcaaacacaagagcacaactgcaacgtcagcagtgaacgcccgacacaatcggagagcgtggtcacgccccttctgacttgcgccatgaaaaacgatgtgaggcagcggcgcgtcctctcctccgccagcttcaaagcgctcgtgcggtttcgcgtgctttgctcggtgttcctctcccgctcgctgacttgccccacgcgcgtatctgcgcgccggtacccctctgcgcagctcggctcgcctgcaggcgcgcgctctcgacacccccctcgtctctgtaactctgtctcttcctcccagccccacccttcttttttcctgcttttccgtttgtttgtacggcgcagtgccgcgaccagcccgttttggctctttctccgcgttgccagcaccagggggttggggtcaccgtgcgcgttgctcctccgctctctctatttccatctccttgctttgttttgcgatctcgccgacggacgctgtcaaaccctcataggttgcttttctccctttctcgcggaacgccggcgtgtcaagacgaggccatgaaaaagcctgaactcaccgcgacgtctgtcgagaagtttctgatcgaaaagttcgacagcgtctccgacctgatgcagctctcggagggcgaagaatctcgtgctttcagcttcgatgtaggagggcgtggatatgtcctgcgggtaaatagctgcgccgatggtttctacaaagatcgttatgtttatcggcactttgcatcggccgcgctcccgattccggaagtgcttgacattggggaattcagcgagagcctgacctattgcatctcccgccgtgcacagggtgtcacgttgcaagacctgcctgaaaccgaactgcccgctgttctgcagccggtcgcggaggcgatggatgcgatcgctgcggccgatcttagccagacgagcgggttcggcccattcggaccgcaaggaatcggtcaatacactacatggcgtgatttcatatgcgcgattgctgatccccatgtgtatcactggcaaactgtgatggacgacaccgtcagtgcgtccgtcgcgcaggctctcgatgagctgatgctttgggccgaggactgccccgaagtccggcacctcgtgcacgcggatttcggctccaacaatgtccatttaaatatcccaatggcgcgccgagcttggctcgagcatggtcatagctgtttcctgtgtgaaattgttatccgctcacaattccacacaacatacgagccggaagcataaagtgtaaagcctggggtgcctaatgagtgagctaactcacattaattgcgttgcgctcactgcccgctttccagtcgggaaacctgtcgtgccagctgcattaatgaatcggccaacgcgcggggagaggcggtttgcgtattgggcgctcttccgcttcctcgctcactgactcgctgcgctcggtcgttcggctgcggcgagcggtatcagctcactcaaaggcggtaatacggttatccacagaatcaggggataacgcaggaaagaacatgtgagcaaaaggccagcaaaaggccaggaaccgtaaaaaggccgcgttgctggcgtttttccataggctccgcccccctgacgagcatcacaaaaatcgacgctcaagtcagaggtggcgaaacccgacaggactataaagataccaggcgtttccccctggaagctccctcgtgcgctctcctgttccgaccctgccgcttaccggatacctgtccgcctttctcccttcgggaagcgtggcgctttctcatagctcacgctgtaggtatctcagttcggtgtaggtcgttcgctccaagctgggctgtgtgcacgaaccccccgttcagcccgaccgctgcgccttatccggtaactatcgtcttgagtccaacccggtaagacacgacttatcgccactggcagcagccactggtaacaggattagcagagcgaggtatgtaggcggtgctacagagttcttgaagtggtggcctaactacggctacactagaagaacagtatttggtatctgcgctctgctgaagccagttaccttcggaaaaagagttggtagctcttgatccggcaaacaaaccaccgctggtagcggtggtttttttgtttgcaagcagcagattacgcgcagaaaaaaaggatctcaagaagatcctttgatcttttctacggggtctgacgctcagtggaacgaaaactcacgttaagggattttggtcatgagattatcaaaaaggatcttcacctagatccttttaaattaaaaatgaagttttaaatcaatctaaagtatatatgagtaaacttggtctgacagttagaaaaactcatcgagcatcaaatgaaactgcaatttattcatatcaggattatcaataccatatttttgaaaaagccgtttctgtaatgaaggagaaaactcaccgaggcagttccataggatggcaagatcctggtatcggtctgcgattccgactcgtccaacatcaatacaacctattaatttcccctcgtcaaaaataaggttatcaagtgagaaatcaccatgagtgacgactgaatccggtgagaatggcaaaagtttatgcatttctttccagacttgttcaacaggccagccattacgctcgtcatcaaaatcactcgcatcaaccaaaccgttattcattcgtgattgcgcctgagcgagacgaaatacgcgatcgctgttaaaaggacaattacaaacaggaatcgaatgcaaccggcgcaggaacactgccagcgcatcaacaatattttcacctgaatcaggatattcttctaatacctggaatgctgttttcccagggatcgcagtggtgagtaaccatgcatcatcaggagtacggataaaatgcttgatggtcggaagaggcataaattccgtcagccagtttagtctgaccatctcatctgtaacatcattggcaacgctacctttgccatgtttcagaaacaactctggcgcatcgggcttcccatacaatcgatagattgtcgcacctgattgcccgacattatcgcgagcccatttatacccatataaatcagcatccatgttggaatttaatcgcggcctagagcaagacgtttcccgttgaatatggctcatactcttcctttttcaatattattgaagcatttatcagggttattgtctcatgagcggatacatatttgaatgtatttagaaaaataaacaaataggggttccgcgcacatttccccgaaaagtgccacctgacgtctaagaaaccattattatcatgacattaacctataaaaataggcgtatcacgaggccctttcgtc

SEQ ID NO: 70 - DNA, 3544 bp, Artificial Sequence
  pLMTB8310
tcgcgcgtttcggtgatgacggtgaaaacctctgacacatgcagctcccggagacggtcacagcttgtctgtaagcggatgccgggagcagacaagcccgtcagggcgcgtcagcgggtgttggcgggtgtcggggctggcttaactatgcggcatcagagcagattgtactgagagtgcaccatatgcggtgtgaaataccgcacagatgcgtaaggagaaaataccgcatcaggcgccattcgccattcaggctgcgcaactgttgggaagggcgatcggtgcgggcctcttcgctattacgccagctggcgaaagggggatgtgctgcaaggcgattaagttgggtaacgccagggttttcccagtcacgacgttgtaaaacgacggccagtgaattgacgcgtattgggatatttaaatgcagcggccccttccgagtacagtactcgagccgagacagtttcaaggtccttgcccgcaacctcggggtgatggatgacctgaagtcaggcgtgccacgcgccggttaccgcggcgtggtctcgttcatatctcgcggccggcgcatctacctcgcgccccctgagggttggacgaaatacgacgtgagctggagctaaattgcacggctcttatttgtcctttgaagtatatatatatatatatatattctgttttcgacttcactgagaagcggagaaatatcattaaaaaatttcagtgggcttgaatgtcgctgactaaatgtgatgcacatctcgaaagagatgcgtaggagatcgagtggctgacagtttttgtgttcaaccacttcccctccgttacaaatgtgcggataactccgtattttccggatgtggcacaatgaaaacgatatgtggatatagagctgttttccttgcctgtgctcgttatgtttgttttcttgtctctcttctgtcttcctctcgagattactgtgaggaggaaagctatcatctgtgatcttacatacctagcctcttttcgcgattacaaaggtactgcaggctcagcgcacatagatttactctctgaagggactgtgctcagtccatttttagactaactgaggagcactgacgacaacaaggatacataaacatgcggttccggatttacaagcgcaaagtggtcatcttgaccctcgtcgtgattatatgcggttttgcagtgtggaacagtggcaaaccgaagaaggccagcacggtgtttccgaaagaggtggagacagtgaagcgcagtagtgtgggcagccaaatccaggcgaccattcctgtcacgcggaagccgatcaacgagtcatttaaatatcccaatggcgcgccgagcttggctcgagcatggtcatagctgtttcctgtgtgaaattgttatccgctcacaattccacacaacatacgagccggaagcataaagtgtaaagcctggggtgcctaatgagtgagctaactcacattaattgcgttgcgctcactgcccgctttccagtcgggaaacctgtcgtgccagctgcattaatgaatcggccaacgcgcggggagaggcggtttgcgtattgggcgctcttccgcttcctcgctcactgactcgctgcgctcggtcgttcggctgcggcgagcggtatcagctcactcaaaggcggtaatacggttatccacagaatcaggggataacgcaggaaagaacatgtgagcaaaaggccagcaaaaggccaggaaccgtaaaaaggccgcgttgctggcgtttttccataggctccgcccccctgacgagcatcacaaaaatcgacgctcaagtcagaggtggcgaaacccgacaggactataaagataccaggcgtttccccctggaagctccctcgtgcgctctcctgttccgaccctgccgcttaccggatacctgtccgcctttctcccttcgggaagcgtggcgctttctcatagctcacgctgtaggtatctcagttcggtgtaggtcgttcgctccaagctgggctgtgtgcacgaaccccccgttcagcccgaccgctgcgccttatccggtaactatcgtcttgagtccaacccggtaagacacgacttatcgccactggcagcagccactggtaacaggattagcagagcgaggtatgtaggcggtgctacagagttcttgaagtggtggcctaactacggctacactagaagaacagtatttggtatctgcgctctgctgaagccagttaccttcggaaaaagagttggtagctcttgatccggcaaacaaaccaccgctggtagcggtggtttttttgtttgcaagcagcagattacgcgcagaaaaaaaggatctcaagaagatcctttgatcttttctacggggtctgacgctcagtggaacgaaaactcacgttaagggattttggtcatgagattatcaaaaaggatcttcacctagatccttttaaattaaaaatgaagttttaaatcaatctaaagtatatatgagtaaacttggtctgacagttagaaaaactcatcgagcatcaaatgaaactgcaatttattcatatcaggattatcaataccatatttttgaaaaagccgtttctgtaatgaaggagaaaactcaccgaggcagttccataggatggcaagatcctggtatcggtctgcgattccgactcgtccaacatcaatacaacctattaatttcccctcgtcaaaaataaggttatcaagtgagaaatcaccatgagtgacgactgaatccggtgagaatggcaaaagtttatgcatttctttccagacttgttcaacaggccagccattacgctcgtcatcaaaatcactcgcatcaaccaaaccgttattcattcgtgattgcgcctgagcgagacgaaatacgcgatcgctgttaaaaggacaattacaaacaggaatcgaatgcaaccggcgcaggaacactgccagcgcatcaacaatattttcacctgaatcaggatattcttctaatacctggaatgctgttttcccagggatcgcagtggtgagtaaccatgcatcatcaggagtacggataaaatgcttgatggtcggaagaggcataaattccgtcagccagtttagtctgaccatctcatctgtaacatcattggcaacgctacctttgccatgtttcagaaacaactctggcgcatcgggcttcccatacaatcgatagattgtcgcacctgattgcccgacattatcgcgagcccatttatacccatataaatcagcatccatgttggaatttaatcgcggcctagagcaagacgtttcccgttgaatatggctcatactcttcctttttcaatattattgaagcatttatcagggttattgtctcatgagcggatacatatttgaatgtatttagaaaaataaacaaataggggttccgcgcacatttccccgaaaagtgccacctgacgtctaagaaaccattattatcatgacattaacctataaaaataggcgtatcacgaggccctttcgtc

SEQ ID NO: 71 - DNA, 3670 bp, Artificial Sequence
  pLMTB8311
tcgcgcgtttcggtgatgacggtgaaaacctctgacacatgcagctcccggagacggtcacagcttgtctgtaagcggatgccgggagcagacaagcccgtcagggcgcgtcagcgggtgttggcgggtgtcggggctggcttaactatgcggcatcagagcagattgtactgagagtgcaccatatgcggtgtgaaataccgcacagatgcgtaaggagaaaataccgcatcaggcgccattcgccattcaggctgcgcaactgttgggaagggcgatcggtgcgggcctcttcgctattacgccagctggcgaaagggggatgtgctgcaaggcgattaagttgggtaacgccagggttttcccagtcacgacgttgtaaaacgacggccagtgaattgacgcgtattgggatatttaaatctgcatgccgagcggccagaagacaaagattgagaacgtgctccagaatagcggtaatcagctcttccctaagcagctcttgatcacgaagcgactgcccgcgtcgggggcgaagggcgtagccccccatgtgaagaacggcggttggggcgacatccgggaccacgaactgtgcaagtcttacctgcgccttcagtaggtcctccggcctgacagcgcgcgcgccgctgtatgtgcgcgtgtgcgcggcttcccactggggccagcgatgaggcgcatcatacctccatagagaccctatcttttgttttctgggcttcccagatgaccacttgattccttccttcctttgatttgtttctctcctcccctccgcagagggtacgagtcagggtaggctcggagaaagcttgccgcatccacgatgagccacggctgtctctctctctctcttgaccgggacaggctgttgcccagtcacgcgtatcggcgtgcacacccgctcttgcgccctgccccactattcgtcgaatgatgcgctacgcgcatgacaggcgctgctgcagcgctgctccctgcggttgctgagtgcgtacatgccgttgctactgatgtgtttgcactgcatctcacctcgctctctttgcgcatgcgcttgcccttcctccctcctcgcgaccgtgtcggtcctctcgcgccgctgtggcgcagctcgccgccttccactcccccaaacacacacgctcatacgctcatatagcactcgtgcgcaccgacacacccacaccccctcctctctctcttctccccaacctacccatcgcagccatgctgaagaagcagtccgccgggttggtgctgtggggcgcaataatctttgttggctggaacgcgctccttctgctttttttctggacccgccctgcccccggacgcctcccttcggacagcgctctcggggacgaccccgcaagccttacgcgtgaagtcattcacctggcagaggatgctgaggcggagcttgagcgatttaaatatcccaatggcgcgccgagcttggctcgagcatggtcatagctgtttcctgtgtgaaattgttatccgctcacaattccacacaacatacgagccggaagcataaagtgtaaagcctggggtgcctaatgagtgagctaactcacattaattgcgttgcgctcactgcccgctttccagtcgggaaacctgtcgtgccagctgcattaatgaatcggccaacgcgcggggagaggcggtttgcgtattgggcgctcttccgcttcctcgctcactgactcgctgcgctcggtcgttcggctgcggcgagcggtatcagctcactcaaaggcggtaatacggttatccacagaatcaggggataacgcaggaaagaacatgtgagcaaaaggccagcaaaaggccaggaaccgtaaaaaggccgcgttgctggcgtttttccataggctccgcccccctgacgagcatcacaaaaatcgacgctcaagtcagaggtggcgaaacccgacaggactataaagataccaggcgtttccccctggaagctccctcgtgcgctctcctgttccgaccctgccgcttaccggatacctgtccgcctttctcccttcgggaagcgtggcgctttctcatagctcacgctgtaggtatctcagttcggtgtaggtcgttcgctccaagctgggctgtgtgcacgaaccccccgttcagcccgaccgctgcgccttatccggtaactatcgtcttgagtccaacccggtaagacacgacttatcgccactggcagcagccactggtaacaggattagcagagcgaggtatgtaggcggtgctacagagttcttgaagtggtggcctaactacggctacactagaagaacagtatttggtatctgcgctctgctgaagccagttaccttcggaaaaagagttggtagctcttgatccggcaaacaaaccaccgctggtagcggtggtttttttgtttgcaagcagcagattacgcgcagaaaaaaaggatctcaagaagatcctttgatcttttctacggggtctgacgctcagtggaacgaaaactcacgttaagggattttggtcatgagattatcaaaaaggatcttcacctagatccttttaaattaaaaatgaagttttaaatcaatctaaagtatatatgagtaaacttggtctgacagttagaaaaactcatcgagcatcaaatgaaactgcaatttattcatatcaggattatcaataccatatttttgaaaaagccgtttctgtaatgaaggagaaaactcaccgaggcagttccataggatggcaagatcctggtatcggtctgcgattccgactcgtccaacatcaatacaacctattaatttcccctcgtcaaaaataaggttatcaagtgagaaatcaccatgagtgacgactgaatccggtgagaatggcaaaagtttatgcatttctttccagacttgttcaacaggccagccattacgctcgtcatcaaaatcactcgcatcaaccaaaccgttattcattcgtgattgcgcctgagcgagacgaaatacgcgatcgctgttaaaaggacaattacaaacaggaatcgaatgcaaccggcgcaggaacactgccagcgcatcaacaatattttcacctgaatcaggatattcttctaatacctggaatgctgttttcccagggatcgcagtggtgagtaaccatgcatcatcaggagtacggataaaatgcttgatggtcggaagaggcataaattccgtcagccagtttagtctgaccatctcatctgtaacatcattggcaacgctacctttgccatgtttcagaaacaactctggcgcatcgggcttcccatacaatcgatagattgtcgcacctgattgcccgacattatcgcgagcccatttatacccatataaatcagcatccatgttggaatttaatcgcggcctagagcaagacgtttcccgttgaatatggctcatactcttcctttttcaatattattgaagcatttatcagggttattgtctcatgagcggatacatatttgaatgtatttagaaaaataaacaaataggggttccgcgcacatttccccgaaaagtgccacctgacgtctaagaaaccattattatcatgacattaacctataaaaataggcgtatcacgaggccctttcgtc

SEQ ID NO: 72 - DNA, 3455 bp, Artificial Sequence
  pLMTB8312
tcgcgcgtttcggtgatgacggtgaaaacctctgacacatgcagctcccggagacggtcacagcttgtctgtaagcggatgccgggagcagacaagcccgtcagggcgcgtcagcgggtgttggcgggtgtcggggctggcttaactatgcggcatcagagcagattgtactgagagtgcaccatatgcggtgtgaaataccgcacagatgcgtaaggagaaaataccgcatcaggcgccattcgccattcaggctgcgcaactgttgggaagggcgatcggtgcgggcctcttcgctattacgccagctggcgaaagggggatgtgctgcaaggcgattaagttgggtaacgccagggttttcccagtcacgacgttgtaaaacgacggccagtgaattgacgcgtattgggatatttaaatgcttggcgaggtgcgtgtccagtatacgtcccgcgacagctttaaggcatttgctaaagccttgggtgtcatggatgatctgaagtctggcgtgccccgtgcaggctaccgtggaatcgtgaccttccagttccggggtcgccgggtccacctcgccccgccggagacctggaacggctacgacccgtcctggaattgagtgactataaagtgctattgaatttttttttcttttcctttcacgaaacaaaaatctgtgtgtgcgcattttcttactctccatttggtgcgcacccttctgggggtatgaccttcagcacacacaaagaacgtgtgctgcgcatatgtgttcaatgcatgtgcttttcctctctttgtttctatcaaggaggttcatatgagagggcatgctcacagcagcttcccttatgcatatgtagccttctgagttcagatgtgatactgctcccttgatctcccttttgtgtttttgttcgaaacaacaatgacgctcttacattctctctacctattatcgtttctttcgcatctgaaagcgtggtactagttagctttatcttagtaaaacagttaccattcactgccaccaaaaatgcgcctgcgtgagcctcttttgtcaggatcggcggctatgcccggagccagtctccagcgggcctgccggttgctcgttgccgtctgcgcgttgcacctgggggtcaccctggtctactacctggctggccgtgacctttcccgcttgccgcagttggtcggtgtatccaccccgctccaggggggctcgaacagcgcatttaaatatcccaatggcgcgccgagcttggctcgagcatggtcatagctgtttcctgtgtgaaattgttatccgctcacaattccacacaacatacgagccggaagcataaagtgtaaagcctggggtgcctaatgagtgagctaactcacattaattgcgttgcgctcactgcccgctttccagtcgggaaacctgtcgtgccagctgcattaatgaatcggccaacgcgcggggagaggcggtttgcgtattgggcgctcttccgcttcctcgctcactgactcgctgcgctcggtcgttcggctgcggcgagcggtatcagctcactcaaaggcggtaatacggttatccacagaatcaggggataacgcaggaaagaacatgtgagcaaaaggccagcaaaaggccaggaaccgtaaaaaggccgcgttgctggcgtttttccataggctccgcccccctgacgagcatcacaaaaatcgacgctcaagtcagaggtggcgaaacccgacaggactataaagataccaggcgtttccccctggaagctccctcgtgcgctctcctgttccgaccctgccgcttaccggatacctgtccgcctttctcccttcgggaagcgtggcgctttctcatagctcacgctgtaggtatctcagttcggtgtaggtcgttcgctccaagctgggctgtgtgcacgaaccccccgttcagcccgaccgctgcgccttatccggtaactatcgtcttgagtccaacccggtaagacacgacttatcgccactggcagcagccactggtaacaggattagcagagcgaggtatgtaggcggtgctacagagttcttgaagtggtggcctaactacggctacactagaagaacagtatttggtatctgcgctctgctgaagccagttaccttcggaaaaagagttggtagctcttgatccggcaaacaaaccaccgctggtagcggtggtttttttgtttgcaagcagcagattacgcgcagaaaaaaaggatctcaagaagatcctttgatcttttctacggggtctgacgctcagtggaacgaaaactcacgttaagggattttggtcatgagattatcaaaaaggatcttcacctagatccttttaaattaaaaatgaagttttaaatcaatctaaagtatatatgagtaaacttggtctgacagttagaaaaactcatcgagcatcaaatgaaactgcaatttattcatatcaggattatcaataccatatttttgaaaaagccgtttctgtaatgaaggagaaaactcaccgaggcagttccataggatggcaagatcctggtatcggtctgcgattccgactcgtccaacatcaatacaacctattaatttcccctcgtcaaaaataaggttatcaagtgagaaatcaccatgagtgacgactgaatccggtgagaatggcaaaagtttatgcatttctttccagacttgttcaacaggccagccattacgctcgtcatcaaaatcactcgcatcaaccaaaccgttattcattcgtgattgcgcctgagcgagacgaaatacgcgatcgctgttaaaaggacaattacaaacaggaatcgaatgcaaccggcgcaggaacactgccagcgcatcaacaatattttcacctgaatcaggatattcttctaatacctggaatgctgttttcccagggatcgcagtggtgagtaaccatgcatcatcaggagtacggataaaatgcttgatggtcggaagaggcataaattccgtcagccagtttagtctgaccatctcatctgtaacatcattggcaacgctacctttgccatgtttcagaaacaactctggcgcatcgggcttcccatacaatcgatagattgtcgcacctgattgcccgacattatcgcgagcccatttatacccatataaatcagcatccatgttggaatttaatcgcggcctagagcaagacgtttcccgttgaatatggctcatactcttcctttttcaatattattgaagcatttatcagggttattgtctcatgagcggatacatatttgaatgtatttagaaaaataaacaaataggggttccgcgcacatttccccgaaaagtgccacctgacgtctaagaaaccattattatcatgacattaacctataaaaataggcgtatcacgaggccctttcgtc

SEQ ID NO: 73 - DNA, 3849 bp, Artificial Sequence
  pLMTB8313
tcgcgcgtttcggtgatgacggtgaaaacctctgacacatgcagctcccggagacggtcacagcttgtctgtaagcggatgccgggagcagacaagcccgtcagggcgcgtcagcgggtgttggcgggtgtcggggctggcttaactatgcggcatcagagcagattgtactgagagtgcaccatatgcggtgtgaaataccgcacagatgcgtaaggagaaaataccgcatcaggcgccattcgccattcaggctgcgcaactgttgggaagggcgatcggtgcgggcctcttcgctattacgccagctggcgaaagggggatgtgctgcaaggcgattaagttgggtaacgccagggttttcccagtcacgacgttgtaaaacgacggccagtgaattgacgcgtattgggatatttaaatcgtgccgcccttccactcagtcagcccagatcgaaagcctgctcaataacaacaaacagtacctcttcccagaaaccctcgtgatcggcgagaagttccctatggcggcgatctccccgccccgtaagaacggggggtggggcgacatacgtgatcatgagctctgtaagtcgtatcgccgcctccaagctggggcctagagtcgtaggccgatgctcatatcttccccttttttcacggtgccgttccttttcttctttcatttcttcccttccgagacaacaaataaacgcaacacatagaagtatagacaggaactgcgccaagctgtgtattgcccttctcccccctcccacaacgacacagtgtgtgcgctgttcatggacgcttcatgtgaggaggaacgcgacgagagacggacagggatggagagccgcgctgaacacgcaaagcgcccgcccacagggacacaaacagaggcacagatggcccgctactggcttccttttcgccgccaagagggcgctgtgcatgcgcacgtgtggggtggcggtggcccaatagcacaagcgtgccgctgtgtatctgtgcatgacacagacatgcaagcatcttgctgctccggctccttttctcgtctgagtgtcggtcgttttttctgtctctcgtacgccaccttgatctttctccatccttccccctctttatctctcgccatctctgtgcccccgcttgtgcgaactgccggtgtgcgaaacccccctcccccaagaaggaggtatttgcgttctttctcgtcgtgtcttcccggcctgacgtttctctctagtcttctcggttttgcattctgagtgctttcatccctgctttccgtgagtccagcgtgcgctgcgcttagctacccgtgtgtgtctcacacacctacaccccgcctatactaaccctccgccctggcaccccctctctccatctcttctcttcgtcgcacgcgtgcacgccatccaatcatgttgaagaagcagtcagcggggcttgtgctctggggagcgatcctcttcgtggcctggaacgctcttctgctcctgtttttctggacccgtccggccccgggccgcccgccgtcggtctccgcactggacggcgatcctgcttctctcacccgggaggtaattcgcttggctcaggatgcggaggtggaattggagcgatttaaatatcccaatggcgcgccgagcttggctcgagcatggtcatagctgtttcctgtgtgaaattgttatccgctcacaattccacacaacatacgagccggaagcataaagtgtaaagcctggggtgcctaatgagtgagctaactcacattaattgcgttgcgctcactgcccgctttccagtcgggaaacctgtcgtgccagctgcattaatgaatcggccaacgcgcggggagaggcggtttgcgtattgggcgctcttccgcttcctcgctcactgactcgctgcgctcggtcgttcggctgcggcgagcggtatcagctcactcaaaggcggtaatacggttatccacagaatcaggggataacgcaggaaagaacatgtgagcaaaaggccagcaaaaggccaggaaccgtaaaaaggccgcgttgctggcgtttttccataggctccgcccccctgacgagcatcacaaaaatcgacgctcaagtcagaggtggcgaaacccgacaggactataaagataccaggcgtttccccctggaagctccctcgtgcgctctcctgttccgaccctgccgcttaccggatacctgtccgcctttctcccttcgggaagcgtggcgctttctcatagctcacgctgtaggtatctcagttcggtgtaggtcgttcgctccaagctgggctgtgtgcacgaaccccccgttcagcccgaccgctgcgccttatccggtaactatcgtcttgagtccaacccggtaagacacgacttatcgccactggcagcagccactggtaacaggattagcagagcgaggtatgtaggcggtgctacagagttcttgaagtggtggcctaactacggctacactagaagaacagtatttggtatctgcgctctgctgaagccagttaccttcggaaaaagagttggtagctcttgatccggcaaacaaaccaccgctggtagcggtggtttttttgtttgcaagcagcagattacgcgcagaaaaaaaggatctcaagaagatcctttgatcttttctacggggtctgacgctcagtggaacgaaaactcacgttaagggattttggtcatgagattatcaaaaaggatcttcacctagatccttttaaattaaaaatgaagttttaaatcaatctaaagtatatatgagtaaacttggtctgacagttagaaaaactcatcgagcatcaaatgaaactgcaatttattcatatcaggattatcaataccatatttttgaaaaagccgtttctgtaatgaaggagaaaactcaccgaggcagttccataggatggcaagatcctggtatcggtctgcgattccgactcgtccaacatcaatacaacctattaatttcccctcgtcaaaaataaggttatcaagtgagaaatcaccatgagtgacgactgaatccggtgagaatggcaaaagtttatgcatttctttccagacttgttcaacaggccagccattacgctcgtcatcaaaatcactcgcatcaaccaaaccgttattcattcgtgattgcgcctgagcgagacgaaatacgcgatcgctgttaaaaggacaattacaaacaggaatcgaatgcaaccggcgcaggaacactgccagcgcatcaacaatattttcacctgaatcaggatattcttctaatacctggaatgctgttttcccagggatcgcagtggtgagtaaccatgcatcatcaggagtacggataaaatgcttgatggtcggaagaggcataaattccgtcagccagtttagtctgaccatctcatctgtaacatcattggcaacgctacctttgccatgtttcagaaacaactctggcgcatcgggcttcccatacaatcgatagattgtcgcacctgattgcccgacattatcgcgagcccatttatacccatataaatcagcatccatgttggaatttaatcgcggcctagagcaagacgtttcccgttgaatatggctcatactcttcctttttcaatattattgaagcatttatcagggttattgtctcatgagcggatacatatttgaatgtatttagaaaaataaacaaataggggttccgcgcacatttccccgaaaagtgccacctgacgtctaagaaaccattattatcatgacattaacctataaaaataggcgtatcacgaggccctttcgtc

SEQ ID NO: 74 - DNA, 3912 bp, Artificial Sequence
  pLMTB8314
tcgcgcgtttcggtgatgacggtgaaaacctctgacacatgcagctcccggagacggtcacagcttgtctgtaagcggatgccgggagcagacaagcccgtcagggcgcgtcagcgggtgttggcgggtgtcggggctggcttaactatgcggcatcagagcagattgtactgagagtgcaccatatgcggtgtgaaataccgcacagatgcgtaaggagaaaataccgcatcaggcgccattcgccattcaggctgcgcaactgttgggaagggcgatcggtgcgggcctcttcgctattacgccagctggcgaaagggggatgtgctgcaaggcgattaagttgggtaacgccagggttttcccagtcacgacgttgtaaaacgacggccagtgaattgacgcgtattgggatatttaaataggtgcgggttcagtacaccggtcgcgacagttttaaggcattcgcgaaggcactgggggtgatggacgacctgaagtccggcgtgccccgcgcgggttaccgcggaatcgtgacgttccagttccgcggccgccgagtgcacctggcgccgccacttacgtgggaaggctacgacccttcatggaacgcgggcgcgtagggtccttgtgaccgcgcgtttggcggactgctcaacagagcgggctaacgctgacgaagatatgctggtttccctgtgtttgtgatttgccatcctttcgtgtcaaaaagaaacaacaacaacagcaacccgtttaggccaagaagcgggcgctcggactctttccctgcctgccccatccccatgaagcacgccggctgtcgcactgggcacctcatgaccctgttgatagcgctggaggccttcattgcgtgctggttgtgggggggggtggaagggggagaggcgtgttgtattcatgtgaggtggtggtggcattgcgcagcggtgggaaaagcagggtcttttccgtactccgtgacagagctgccgtgctcatcttttcccggttcactgcttgcactgttggctgcctcgccttctcccctccccctgcccccacgaaacgcggttaccgcgtctccttcgtgggagaagtggagtggcacagttaaggcgactacaaggagttccccctaccctggagggagacttgcgggcgcgggacgccttgtctacgtgagcgtctcttcccaagtagacgactccctcgactttgtcccctccgtcgcattccgcccctctccgccctcctttcgtgtacgtctctgcattgtacacttcctttcgcctgctttcccacgctcgcgcgcaacaacgtggacgcaccacatcgctcgctggagaagagagaaaagtggtgagtacgtgttccgctctttcccttctcccctccgctcgcgtcgcacctctccgcagctttaccgctctcttcccttccatcatccgcgtcgtgcaccacttccctcattttccgtgcggcagtagaaaatgcggttccgcatttataagcgcaaggtcttgatcctgacgctggtcgtcgccgcatgcggatttgtgctgtggagctcgaacggtcgccagcgcaagaacgaagcgctcgccccgccgctgcttgacgcggagcctgcacgaggcgcgggtggccgtggcggcgaccacccgagcgtggcggtgggtatccgccgcgtatttaaatatcccaatggcgcgccgagcttggctcgagcatggtcatagctgtttcctgtgtgaaattgttatccgctcacaattccacacaacatacgagccggaagcataaagtgtaaagcctggggtgcctaatgagtgagctaactcacattaattgcgttgcgctcactgcccgctttccagtcgggaaacctgtcgtgccagctgcattaatgaatcggccaacgcgcggggagaggcggtttgcgtattgggcgctcttccgcttcctcgctcactgactcgctgcgctcggtcgttcggctgcggcgagcggtatcagctcactcaaaggcggtaatacggttatccacagaatcaggggataacgcaggaaagaacatgtgagcaaaaggccagcaaaaggccaggaaccgtaaaaaggccgcgttgctggcgtttttccataggctccgcccccctgacgagcatcacaaaaatcgacgctcaagtcagaggtggcgaaacccgacaggactataaagataccaggcgtttccccctggaagctccctcgtgcgctctcctgttccgaccctgccgcttaccggatacctgtccgcctttctcccttcgggaagcgtggcgctttctcatagctcacgctgtaggtatctcagttcggtgtaggtcgttcgctccaagctgggctgtgtgcacgaaccccccgttcagcccgaccgctgcgccttatccggtaactatcgtcttgagtccaacccggtaagacacgacttatcgccactggcagcagccactggtaacaggattagcagagcgaggtatgtaggcggtgctacagagttcttgaagtggtggcctaactacggctacactagaagaacagtatttggtatctgcgctctgctgaagccagttaccttcggaaaaagagttggtagctcttgatccggcaaacaaaccaccgctggtagcggtggtttttttgtttgcaagcagcagattacgcgcagaaaaaaaggatctcaagaagatcctttgatcttttctacggggtctgacgctcagtggaacgaaaactcacgttaagggattttggtcatgagattatcaaaaaggatcttcacctagatccttttaaattaaaaatgaagttttaaatcaatctaaagtatatatgagtaaacttggtctgacagttagaaaaactcatcgagcatcaaatgaaactgcaatttattcatatcaggattatcaataccatatttttgaaaaagccgtttctgtaatgaaggagaaaactcaccgaggcagttccataggatggcaagatcctggtatcggtctgcgattccgactcgtccaacatcaatacaacctattaatttcccctcgtcaaaaataaggttatcaagtgagaaatcaccatgagtgacgactgaatccggtgagaatggcaaaagtttatgcatttctttccagacttgttcaacaggccagccattacgctcgtcatcaaaatcactcgcatcaaccaaaccgttattcattcgtgattgcgcctgagcgagacgaaatacgcgatcgctgttaaaaggacaattacaaacaggaatcgaatgcaaccggcgcaggaacactgccagcgcatcaacaatattttcacctgaatcaggatattcttctaatacctggaatgctgttttcccagggatcgcagtggtgagtaaccatgcatcatcaggagtacggataaaatgcttgatggtcggaagaggcataaattccgtcagccagtttagtctgaccatctcatctgtaacatcattggcaacgctacctttgccatgtttcagaaacaactctggcgcatcgggcttcccatacaatcgatagattgtcgcacctgattgcccgacattatcgcgagcccatttatacccatataaatcagcatccatgttggaatttaatcgcggcctagagcaagacgtttcccgttgaatatggctcatactcttcctttttcaatattattgaagcatttatcagggttattgtctcatgagcggatacatatttgaatgtatttagaaaaataaacaaataggggttccgcgcacatttccccgaaaagtgccacctgacgtctaagaaaccattattatcatgacattaacctataaaaataggcgtatcacgaggccctttcgtc

SEQ ID NO: 75 - DNA, 3892 bp, Artificial Sequence
  pLMTB8315
tcgcgcgtttcggtgatgacggtgaaaacctctgacacatgcagctcccggagacggtcacagcttgtctgtaagcggatgccgggagcagacaagcccgtcagggcgcgtcagcgggtgttggcgggtgtcggggctggcttaactatgcggcatcagagcagattgtactgagagtgcaccatatgcggtgtgaaataccgcacagatgcgtaaggagaaaataccgcatcaggcgccattcgccattcaggctgcgcaactgttgggaagggcgatcggtgcgggcctcttcgctattacgccagctggcgaaagggggatgtgctgcaaggcgattaagttgggtaacgccagggttttcccagtcacgacgttgtaaaacgacggccagtgaattgacgcgtattgggatatttaaatacaaaaagacgtgtcgtccatcgacgcaatctgcccaaatcgagtcgcttctgaacaataacaagcagtacatgtttcccgaaacgctcactatctcggagaagtttaccgtcgtggccatatcaccgccacgcaagaatggcggctggggcgacatacgcgatcatgaattgtgtaagtcgtatcgccgcctgcagtgattcgcttcgcggtgccggccattggcgtactctcgctttttcttattttgcctttccttttcatttcatgaagaaacaaactgcaaacgaatcggacagcggcacgacctgcactcgccgcttactagactatcagcagcacagctccggggaaggattctctctgccacagagaacaatctcttggttttcttcccttacctcaccgcaacttaaccgttggtgccgtcttctcgcttgtgtgtgcgtgtaagtgtgctcttgccactgctcccgcacagcctgcctgattctgcgctgcgggcgaaatgaagccgagggtcttcgacccagcctcgtgccacgtccgttgcatctgctcgcttgtaagatggctgttgatcgcctcctcctccccatttcttcatttgattggcttctggggcactgttcagctcccttcacacataccggaactcaaccaggtatccgtcgacaccgctcgccatcgtgcgcgttcaccggccgcacggcgcctcagtcagccttctttgccactcactcgatcaccacagacagagtgcagggtgtcgtgtcgcacaggactacctcgcggatcgtgtcttgcgactttggttgcgctcacaccttctcgtcttcttcgttctctcgcgaggagctgcaaatcgtggtttctacgcctttttctctttcccggtttgacagcgtctcggcgtgtgctgctgttatcccagtccagggctctcttccacacctcttcggaagagtcttgtcaacgttgacggtgccacgtaggaagtaggcttgaggcttttcgcgcttctttttgtcctagccagaagaagccgcaatgcgcctccgagaacccctgctgagcggatcagccgcgatgccgggtgcctccctccaacgcgcctgtcgcctccttgtggcggtatgcgcactgcaccttggtgtaacactggtctactacctggccgggcgggaccttagccggctcccgcaattggtcggtgtgtcgaccccactgcagggtggctccaattcagcatttaaatatcccaatggcgcgccgagcttggctcgagcatggtcatagctgtttcctgtgtgaaattgttatccgctcacaattccacacaacatacgagccggaagcataaagtgtaaagcctggggtgcctaatgagtgagctaactcacattaattgcgttgcgctcactgcccgctttccagtcgggaaacctgtcgtgccagctgcattaatgaatcggccaacgcgcggggagaggcggtttgcgtattgggcgctcttccgcttcctcgctcactgactcgctgcgctcggtcgttcggctgcggcgagcggtatcagctcactcaaaggcggtaatacggttatccacagaatcaggggataacgcaggaaagaacatgtgagcaaaaggccagcaaaaggccaggaaccgtaaaaaggccgcgttgctggcgtttttccataggctccgcccccctgacgagcatcacaaaaatcgacgctcaagtcagaggtggcgaaacccgacaggactataaagataccaggcgtttccccctggaagctccctcgtgcgctctcctgttccgaccctgccgcttaccggatacctgtccgcctttctcccttcgggaagcgtggcgctttctcatagctcacgctgtaggtatctcagttcggtgtaggtcgttcgctccaagctgggctgtgtgcacgaaccccccgttcagcccgaccgctgcgccttatccggtaactatcgtcttgagtccaacccggtaagacacgacttatcgccactggcagcagccactggtaacaggattagcagagcgaggtatgtaggcggtgctacagagttcttgaagtggtggcctaactacggctacactagaagaacagtatttggtatctgcgctctgctgaagccagttaccttcggaaaaagagttggtagctcttgatccggcaaacaaaccaccgctggtagcggtggtttttttgtttgcaagcagcagattacgcgcagaaaaaaaggatctcaagaagatcctttgatcttttctacggggtctgacgctcagtggaacgaaaactcacgttaagggattttggtcatgagattatcaaaaaggatcttcacctagatccttttaaattaaaaatgaagttttaaatcaatctaaagtatatatgagtaaacttggtctgacagttagaaaaactcatcgagcatcaaatgaaactgcaatttattcatatcaggattatcaataccatatttttgaaaaagccgtttctgtaatgaaggagaaaactcaccgaggcagttccataggatggcaagatcctggtatcggtctgcgattccgactcgtccaacatcaatacaacctattaatttcccctcgtcaaaaataaggttatcaagtgagaaatcaccatgagtgacgactgaatccggtgagaatggcaaaagtttatgcatttctttccagacttgttcaacaggccagccattacgctcgtcatcaaaatcactcgcatcaaccaaaccgttattcattcgtgattgcgcctgagcgagacgaaatacgcgatcgctgttaaaaggacaattacaaacaggaatcgaatgcaaccggcgcaggaacactgccagcgcatcaacaatattttcacctgaatcaggatattcttctaatacctggaatgctgttttcccagggatcgcagtggtgagtaaccatgcatcatcaggagtacggataaaatgcttgatggtcggaagaggcataaattccgtcagccagtttagtctgaccatctcatctgtaacatcattggcaacgctacctttgccatgtttcagaaacaactctggcgcatcgggcttcccatacaatcgatagattgtcgcacctgattgcccgacattatcgcgagcccatttatacccatataaatcagcatccatgttggaatttaatcgcggcctagagcaagacgtttcccgttgaatatggctcatactcttcctttttcaatattattgaagcatttatcagggttattgtctcatgagcggatacatatttgaatgtatttagaaaaataaacaaataggggttccgcgcacatttccccgaaaagtgccacctgacgtctaagaaaccattattatcatgacattaacctataaaaataggcgtatcacgaggccctttcgtc

SEQ ID NO: 76 - DNA, 4039 bp, Artificial Sequence
  pLMTB8316
tcgcgcgtttcggtgatgacggtgaaaacctctgacacatgcagctcccggagacggtcacagcttgtctgtaagcggatgccgggagcagacaagcccgtcagggcgcgtcagcgggtgttggcgggtgtcggggctggcttaactatgcggcatcagagcagattgtactgagagtgcaccatatgcggtgtgaaataccgcacagatgcgtaaggagaaaataccgcatcaggcgccattcgccattcaggctgcgcaactgttgggaagggcgatcggtgcgggcctcttcgctattacgccagctggcgaaagggggatgtgctgcaaggcgattaagttgggtaacgccagggttttcccagtcacgacgttgtaaaacgacggccagtgaattgacgcgtattgggatatttaaatatgcgcctgcgtgagcctcttttgtcaggatcggcggctatgcccggagccagtctccagcgggcctgccggttgctcgttgccgtctgcgcgttgcacctgggggtcaccctggtctactacctggctggccgtgacctttcccgcttgccgcagttggtcggtgtatccaccccgctccaggggggctcgaacagcgcagcggcgataggacagtcttcgggcgagctgcgaaccggcggagcgcgcccacccccacccctgggcgcgagttcccagccccgcccgggtggtgacagctcgccggtggtagattcaggaccagggcccgccagtaacctcacgtcagtgccagtaccccacaccacggctttgagcctgcctgcttgcccggaggagagtcctctgcttgtaggaccaatgttgattgaatttaacatgcctgtggacctggagctggtggcgaagcagaatccaaacgtgaaaatgggcggtcggtacgcgcctcgcgattgcgtctcaccgcacaaggtagcgattataataccctttcgcaaccgacaagaacacctgaagtactggctctactatctccaccctgtcctgcagcgccagcagctggactacggcatttacgtgatcaaccaggcgggcgatactatctttaaccgtgcgaagctcctcaatgtagggtttcaggaggctctgaaggactacgactacacatgctttgtctttagcgacgtggatctcattccaatgaatgaccataacgcctaccgctgcttttcccagccgcgccatatctctgtggccatggacaagttcggcttctcgctgccatacgtgcagtacttcggaggcgtgtctgcactgagtaagcaacagttcctgaccattaacggcttccccaacaactattggggctggggcggggaagacgatgacatctttaaccggctggtcttccgaggtatgagcatttcgcgcccaaacgccgtcgtgggacgctgccggatgatacgacacagccgagacaaaaagaacgagcctaatccgcagcgcttcgaccgcatagctcacacgaaggagactatgttgagcgacggcctcaatagcttgacgtatcaggttttggatgtgcagcgttacccactgtacacacagatcactgtggatatcggtacgccttcttaatccgcgtgccgtagctcgctgcgtatgaggtactcggttccagtgcatcacgcggcgcagggcaacacaaactttctttttgtttctcttcaagtcaaaaaagaaaaagaaaacagccataccgcacaccatccataacaaggggcgtgtgaggggcggcggctctcgggctttaccccgccaatgcagcaacacgcggcatttaaatatcccaatggcgcgccgagcttggctcgagcatggtcatagctgtttcctgtgtgaaattgttatccgctcacaattccacacaacatacgagccggaagcataaagtgtaaagcctggggtgcctaatgagtgagctaactcacattaattgcgttgcgctcactgcccgctttccagtcgggaaacctgtcgtgccagctgcattaatgaatcggccaacgcgcggggagaggcggtttgcgtattgggcgctcttccgcttcctcgctcactgactcgctgcgctcggtcgttcggctgcggcgagcggtatcagctcactcaaaggcggtaatacggttatccacagaatcaggggataacgcaggaaagaacatgtgagcaaaaggccagcaaaaggccaggaaccgtaaaaaggccgcgttgctggcgtttttccataggctccgcccccctgacgagcatcacaaaaatcgacgctcaagtcagaggtggcgaaacccgacaggactataaagataccaggcgtttccccctggaagctccctcgtgcgctctcctgttccgaccctgccgcttaccggatacctgtccgcctttctcccttcgggaagcgtggcgctttctcatagctcacgctgtaggtatctcagttcggtgtaggtcgttcgctccaagctgggctgtgtgcacgaaccccccgttcagcccgaccgctgcgccttatccggtaactatcgtcttgagtccaacccggtaagacacgacttatcgccactggcagcagccactggtaacaggattagcagagcgaggtatgtaggcggtgctacagagttcttgaagtggtggcctaactacggctacactagaagaacagtatttggtatctgcgctctgctgaagccagttaccttcggaaaaagagttggtagctcttgatccggcaaacaaaccaccgctggtagcggtggtttttttgtttgcaagcagcagattacgcgcagaaaaaaaggatctcaagaagatcctttgatcttttctacggggtctgacgctcagtggaacgaaaactcacgttaagggattttggtcatgagattatcaaaaaggatcttcacctagatccttttaaattaaaaatgaagttttaaatcaatctaaagtatatatgagtaaacttggtctgacagttagaaaaactcatcgagcatcaaatgaaactgcaatttattcatatcaggattatcaataccatatttttgaaaaagccgtttctgtaatgaaggagaaaactcaccgaggcagttccataggatggcaagatcctggtatcggtctgcgattccgactcgtccaacatcaatacaacctattaatttcccctcgtcaaaaataaggttatcaagtgagaaatcaccatgagtgacgactgaatccggtgagaatggcaaaagtttatgcatttctttccagacttgttcaacaggccagccattacgctcgtcatcaaaatcactcgcatcaaccaaaccgttattcattcgtgattgcgcctgagcgagacgaaatacgcgatcgctgttaaaaggacaattacaaacaggaatcgaatgcaaccggcgcaggaacactgccagcgcatcaacaatattttcacctgaatcaggatattcttctaatacctggaatgctgttttcccagggatcgcagtggtgagtaaccatgcatcatcaggagtacggataaaatgcttgatggtcggaagaggcataaattccgtcagccagtttagtctgaccatctcatctgtaacatcattggcaacgctacctttgccatgtttcagaaacaactctggcgcatcgggcttcccatacaatcgatagattgtcgcacctgattgcccgacattatcgcgagcccatttatacccatataaatcagcatccatgttggaatttaatcgcggcctagagcaagacgtttcccgttgaatatggctcatactcttcctttttcaatattattgaagcatttatcagggttattgtctcatgagcggatacatatttgaatgtatttagaaaaataaacaaataggggttccgcgcacatttccccgaaaagtgccacctgacgtctaagaaaccattattatcatgacattaacctataaaaataggcgtatcacgaggccctttcgtc

SEQ ID NO: 77 - DNA, 3851 bp, Artificial Sequence
  pLMTB8318
tcgcgcgtttcggtgatgacggtgaaaacctctgacacatgcagctcccggagacggtcacagcttgtctgtaagcggatgccgggagcagacaagcccgtcagggcgcgtcagcgggtgttggcgggtgtcggggctggcttaactatgcggcatcagagcagattgtactgagagtgcaccatatgcggtgtgaaataccgcacagatgcgtaaggagaaaataccgcatcaggcgccattcgccattcaggctgcgcaactgttgggaagggcgatcggtgcgggcctcttcgctattacgccagctggcgaaagggggatgtgctgcaaggcgattaagttgggtaacgccagggttttcccagtcacgacgttgtaaaacgacggccagtgaattgacgcgtattgggatatttaaattccgcgtgccgtagctcgctgcgtatgaggtactcggttccagtgcatcacgcggcgcagggcaacacaaactttctttttgtttctcttcaagtcaaaaaagaaaaagaaaacagccataccgcacaccatccataacaaggggcgtgtgaggggcggcggctctcgggctttaccccgccaatgcagcaacacgcggcttgtacgcaacgcttcttttggcatgtcacgctgaacagaatctctgcgtacagcaaccacgttgccatcggcccgtcactcgctcctctctcctccagcattcttgagtgactacaggtatgtttggttcagtgcgtatgcgagcgttagtgcatcccctatacaagcacgtgccgccagggcgcgtatcttcgcagtgagacgcacttgctttaccgactacctgtgcttaagtcccccccactgacctaaacaaactctgaccatcgcatcacctctcgtttcgtcgtcgtgcctctctccctttctctgccgattgtgattcctctcctcatgccattctcctgaaatccctcatcactcttccgcaacagctccttttttccccaccaaggatgaaaaagcctgaactcaccgcgacgtctgtcgagaagtttctgatcgaaaagttcgacagcgtctccgacctgatgcagctctcggagggcgaagaatctcgtgctttcagcttcgatgtaggagggcgtggatatgtcctgcgggtaaatagctgcgccgatggtttctacaaagatcgttatgtttatcggcactttgcatcggccgcgctcccgattccggaagtgcttgacattggggaattcagcgagagcctgacctattgcatctcccgccgtgcacagggtgtcacgttgcaagacctgcctgaaaccgaactgcccgctgttctgcagccggtcgcggaggcgatggatgcgatcgctgcggccgatcttagccagacgagcgggttcggcccattcggaccgcaaggaatcggtcaatacactacatggcgtgatttcatatgcgcgattgctgatccccatgtgtatcactggcaaactgtgatggacgacaccgtcagtgcgtccgtcgcgcaggctctcgatgagctgatgctttgggccgaggactgccccgaagtccggcacctcgtgcacgcggatttcggctccaacaatgtccatttaaatatcccaatggcgcgccgagcttggctcgagcatggtcatagctgtttcctgtgtgaaattgttatccgctcacaattccacacaacatacgagccggaagcataaagtgtaaagcctggggtgcctaatgagtgagctaactcacattaattgcgttgcgctcactgcccgctttccagtcgggaaacctgtcgtgccagctgcattaatgaatcggccaacgcgcggggagaggcggtttgcgtattgggcgctcttccgcttcctcgctcactgactcgctgcgctcggtcgttcggctgcggcgagcggtatcagctcactcaaaggcggtaatacggttatccacagaatcaggggataacgcaggaaagaacatgtgagcaaaaggccagcaaaaggccaggaaccgtaaaaaggccgcgttgctggcgtttttccataggctccgcccccctgacgagcatcacaaaaatcgacgctcaagtcagaggtggcgaaacccgacaggactataaagataccaggcgtttccccctggaagctccctcgtgcgctctcctgttccgaccctgccgcttaccggatacctgtccgcctttctcccttcgggaagcgtggcgctttctcatagctcacgctgtaggtatctcagttcggtgtaggtcgttcgctccaagctgggctgtgtgcacgaaccccccgttcagcccgaccgctgcgccttatccggtaactatcgtcttgagtccaacccggtaagacacgacttatcgccactggcagcagccactggtaacaggattagcagagcgaggtatgtaggcggtgctacagagttcttgaagtggtggcctaactacggctacactagaagaacagtatttggtatctgcgctctgctgaagccagttaccttcggaaaaagagttggtagctcttgatccggcaaacaaaccaccgctggtagcggtggtttttttgtttgcaagcagcagattacgcgcagaaaaaaaggatctcaagaagatcctttgatcttttctacggggtctgacgctcagtggaacgaaaactcacgttaagggattttggtcatgagattatcaaaaaggatcttcacctagatccttttaaattaaaaatgaagttttaaatcaatctaaagtatatatgagtaaacttggtctgacagttagaaaaactcatcgagcatcaaatgaaactgcaatttattcatatcaggattatcaataccatatttttgaaaaagccgtttctgtaatgaaggagaaaactcaccgaggcagttccataggatggcaagatcctggtatcggtctgcgattccgactcgtccaacatcaatacaacctattaatttcccctcgtcaaaaataaggttatcaagtgagaaatcaccatgagtgacgactgaatccggtgagaatggcaaaagtttatgcatttctttccagacttgttcaacaggccagccattacgctcgtcatcaaaatcactcgcatcaaccaaaccgttattcattcgtgattgcgcctgagcgagacgaaatacgcgatcgctgttaaaaggacaattacaaacaggaatcgaatgcaaccggcgcaggaacactgccagcgcatcaacaatattttcacctgaatcaggatattcttctaatacctggaatgctgttttcccagggatcgcagtggtgagtaaccatgcatcatcaggagtacggataaaatgcttgatggtcggaagaggcataaattccgtcagccagtttagtctgaccatctcatctgtaacatcattggcaacgctacctttgccatgtttcagaaacaactctggcgcatcgggcttcccatacaatcgatagattgtcgcacctgattgcccgacattatcgcgagcccatttatacccatataaatcagcatccatgttggaatttaatcgcggcctagagcaagacgtttcccgttgaatatggctcatactcttcctttttcaatattattgaagcatttatcagggttattgtctcatgagcggatacatatttgaatgtatttagaaaaataaacaaataggggttccgcgcacatttccccgaaaagtgccacctgacgtctaagaaaccattattatcatgacattaacctataaaaataggcgtatcacgaggccctttcgtc

SEQ ID NO: 78 - DNA, 3529 bp, Artificial Sequence
  pLMTB8322
tcgcgcgtttcggtgatgacggtgaaaacctctgacacatgcagctcccggagacggtcacagcttgtctgtaagcggatgccgggagcagacaagcccgtcagggcgcgtcagcgggtgttggcgggtgtcggggctggcttaactatgcggcatcagagcagattgtactgagagtgcaccatatgcggtgtgaaataccgcacagatgcgtaaggagaaaataccgcatcaggcgccattcgccattcaggctgcgcaactgttgggaagggcgatcggtgcgggcctcttcgctattacgccagctggcgaaagggggatgtgctgcaaggcgattaagttgggtaacgccagggttttcccagtcacgacgttgtaaaacgacggccagtgaattgacgcgtattgggatatttaaatgcagcggccccttccgagtacagtactcgagccgagacagtttcaaggtccttgcccgcaacctcggggtgatggatgacctgaagtcaggcgtgccacgcgccggttaccgcggcgtggtctcgttcatatctcgcggccggcgcatctacctcgcgccccctgagggttggacgaaatacgacgtgagctggagctaaggtttatcagctccaggaacgaatgtacttttattattattgtttcgtgtcatgtaattgactctatttaaaaccaagcaaagcaactctttaccagggaagccgacaaggctttctattcccgaagaacctttgcggctttccaactcataggagagccgtctcttccccacttcggcttcaataaaggaaaatggcgtctttcgagtagaaaagggcagatgcggcgcattgcgtgctttgcacctatatccgccacagctcgcatttcgactgcgtagaaagtagtggaaatatgttcttcaccaagaccgtgcctgtttgctctctcaattctcgtttcgctataacatcccttcctctttaaaaaaaaatctgttgtgtctctgcagcatttctggtacccgagctgtttcctctcgctagggaagcaacaacagctactgcttgttgttattagtgcgaaatagagcatctgaaacggaaaatgcggttccggatttacaagcgcaaagtggtcatcttgaccctcgtcgtgattatatgcggttttgcagtgtggaacagtggcaaaccgaagaaggccagcacggtgtttccgaaagaggtggagacagtgaagcgcagtagtgtgggcagccaaatccaggcgaccattcctgtcacgcggaagccgatcaacgagtcatttaaatatcccaatggcgcgccgagcttggctcgagcatggtcatagctgtttcctgtgtgaaattgttatccgctcacaattccacacaacatacgagccggaagcataaagtgtaaagcctggggtgcctaatgagtgagctaactcacattaattgcgttgcgctcactgcccgctttccagtcgggaaacctgtcgtgccagctgcattaatgaatcggccaacgcgcggggagaggcggtttgcgtattgggcgctcttccgcttcctcgctcactgactcgctgcgctcggtcgttcggctgcggcgagcggtatcagctcactcaaaggcggtaatacggttatccacagaatcaggggataacgcaggaaagaacatgtgagcaaaaggccagcaaaaggccaggaaccgtaaaaaggccgcgttgctggcgtttttccataggctccgcccccctgacgagcatcacaaaaatcgacgctcaagtcagaggtggcgaaacccgacaggactataaagataccaggcgtttccccctggaagctccctcgtgcgctctcctgttccgaccctgccgcttaccggatacctgtccgcctttctcccttcgggaagcgtggcgctttctcatagctcacgctgtaggtatctcagttcggtgtaggtcgttcgctccaagctgggctgtgtgcacgaaccccccgttcagcccgaccgctgcgccttatccggtaactatcgtcttgagtccaacccggtaagacacgacttatcgccactggcagcagccactggtaacaggattagcagagcgaggtatgtaggcggtgctacagagttcttgaagtggtggcctaactacggctacactagaagaacagtatttggtatctgcgctctgctgaagccagttaccttcggaaaaagagttggtagctcttgatccggcaaacaaaccaccgctggtagcggtggtttttttgtttgcaagcagcagattacgcgcagaaaaaaaggatctcaagaagatcctttgatcttttctacggggtctgacgctcagtggaacgaaaactcacgttaagggattttggtcatgagattatcaaaaaggatcttcacctagatccttttaaattaaaaatgaagttttaaatcaatctaaagtatatatgagtaaacttggtctgacagttagaaaaactcatcgagcatcaaatgaaactgcaatttattcatatcaggattatcaataccatatttttgaaaaagccgtttctgtaatgaaggagaaaactcaccgaggcagttccataggatggcaagatcctggtatcggtctgcgattccgactcgtccaacatcaatacaacctattaatttcccctcgtcaaaaataaggttatcaagtgagaaatcaccatgagtgacgactgaatccggtgagaatggcaaaagtttatgcatttctttccagacttgttcaacaggccagccattacgctcgtcatcaaaatcactcgcatcaaccaaaccgttattcattcgtgattgcgcctgagcgagacgaaatacgcgatcgctgttaaaaggacaattacaaacaggaatcgaatgcaaccggcgcaggaacactgccagcgcatcaacaatattttcacctgaatcaggatattcttctaatacctggaatgctgttttcccagggatcgcagtggtgagtaaccatgcatcatcaggagtacggataaaatgcttgatggtcggaagaggcataaattccgtcagccagtttagtctgaccatctcatctgtaacatcattggcaacgctacctttgccatgtttcagaaacaactctggcgcatcgggcttcccatacaatcgatagattgtcgcacctgattgcccgacattatcgcgagcccatttatacccatataaatcagcatccatgttggaatttaatcgcggcctagagcaagacgtttcccgttgaatatggctcatactcttcctttttcaatattattgaagcatttatcagggttattgtctcatgagcggatacatatttgaatgtatttagaaaaataaacaaataggggttccgcgcacatttccccgaaaagtgccacctgacgtctaagaaaccattattatcatgacattaacctataaaaataggcgtatcacgaggccctttcgtc

SEQ ID NO: 79 - DNA, 3665 bp, Artificial Sequence
  pLMTB8323
tcgcgcgtttcggtgatgacggtgaaaacctctgacacatgcagctcccggagacggtcacagcttgtctgtaagcggatgccgggagcagacaagcccgtcagggcgcgtcagcgggtgttggcgggtgtcggggctggcttaactatgcggcatcagagcagattgtactgagagtgcaccatatgcggtgtgaaataccgcacagatgcgtaaggagaaaataccgcatcaggcgccattcgccattcaggctgcgcaactgttgggaagggcgatcggtgcgggcctcttcgctattacgccagctggcgaaagggggatgtgctgcaaggcgattaagttgggtaacgccagggttttcccagtcacgacgttgtaaaacgacggccagtgaattgacgcgtattgggatatttaaatctgcatgccgagcggccagaagacaaagattgagaacgtgctccagaatagcggtaatcagctcttccctaagcagctcttgatcacgaagcgactgcccgcgtcgggggcgaagggcgtagccccccatgtgaagaacggcggttggggcgacatccgggaccacgaactgtgcaagtcttacctgcgccttcagtagacccgtgacggcatgtttgcctcttttgcattttattttatttttatttgctagtgagagattctcatgcgcgtttataaaaaaagagaaagacaggcgatgagggggcacatctgtgatccttgtgcaccgtgaatggcgcctgcctgcgcctacctgagaagcagtggggatgtcacgcctctcagacacacgttcgagacaggacgttgtgaatgctgtttctccttctccgtcttcctcgcgcctgctggacaactggtagccaatcgtgttgtccttttcacctccgcttgatagggtcacaagcggcaaggaacgcggagggggaggggccgtaaaggtaaaggagcccgtttctacaggggcaccgtgcgtcatgttggcaagatgatgtagaattttttaaggggccggccctatccccttctctgtgctccgcacgggtcgcctttttttctgtcgctgttgttgtcgctactcacgttcttaccctccctttctctctctttggagctgtcgtcgtcacacaagcgctcaacctcttgccagtgagtctgttggacaacgttcaccgagtaaaagacgtctttgcgagcctttctatgacggaagctcggagtcatgctgaagaagcagtccgccgggttggtgctgtggggcgcaataatctttgttggctggaacgcgctccttctgctttttttctggacccgccctgcccccggacgcctcccttcggacagcgctctcggggacgaccccgcaagccttacgcgtgaagtcattcacctggcagaggatgctgaggcggagcttgagcgatttaaatatcccaatggcgcgccgagcttggctcgagcatggtcatagctgtttcctgtgtgaaattgttatccgctcacaattccacacaacatacgagccggaagcataaagtgtaaagcctggggtgcctaatgagtgagctaactcacattaattgcgttgcgctcactgcccgctttccagtcgggaaacctgtcgtgccagctgcattaatgaatcggccaacgcgcggggagaggcggtttgcgtattgggcgctcttccgcttcctcgctcactgactcgctgcgctcggtcgttcggctgcggcgagcggtatcagctcactcaaaggcggtaatacggttatccacagaatcaggggataacgcaggaaagaacatgtgagcaaaaggccagcaaaaggccaggaaccgtaaaaaggccgcgttgctggcgtttttccataggctccgcccccctgacgagcatcacaaaaatcgacgctcaagtcagaggtggcgaaacccgacaggactataaagataccaggcgtttccccctggaagctccctcgtgcgctctcctgttccgaccctgccgcttaccggatacctgtccgcctttctcccttcgggaagcgtggcgctttctcatagctcacgctgtaggtatctcagttcggtgtaggtcgttcgctccaagctgggctgtgtgcacgaaccccccgttcagcccgaccgctgcgccttatccggtaactatcgtcttgagtccaacccggtaagacacgacttatcgccactggcagcagccactggtaacaggattagcagagcgaggtatgtaggcggtgctacagagttcttgaagtggtggcctaactacggctacactagaagaacagtatttggtatctgcgctctgctgaagccagttaccttcggaaaaagagttggtagctcttgatccggcaaacaaaccaccgctggtagcggtggtttttttgtttgcaagcagcagattacgcgcagaaaaaaaggatctcaagaagatcctttgatcttttctacggggtctgacgctcagtggaacgaaaactcacgttaagggattttggtcatgagattatcaaaaaggatcttcacctagatccttttaaattaaaaatgaagttttaaatcaatctaaagtatatatgagtaaacttggtctgacagttagaaaaactcatcgagcatcaaatgaaactgcaatttattcatatcaggattatcaataccatatttttgaaaaagccgtttctgtaatgaaggagaaaactcaccgaggcagttccataggatggcaagatcctggtatcggtctgcgattccgactcgtccaacatcaatacaacctattaatttcccctcgtcaaaaataaggttatcaagtgagaaatcaccatgagtgacgactgaatccggtgagaatggcaaaagtttatgcatttctttccagacttgttcaacaggccagccattacgctcgtcatcaaaatcactcgcatcaaccaaaccgttattcattcgtgattgcgcctgagcgagacgaaatacgcgatcgctgttaaaaggacaattacaaacaggaatcgaatgcaaccggcgcaggaacactgccagcgcatcaacaatattttcacctgaatcaggatattcttctaatacctggaatgctgttttcccagggatcgcagtggtgagtaaccatgcatcatcaggagtacggataaaatgcttgatggtcggaagaggcataaattccgtcagccagtttagtctgaccatctcatctgtaacatcattggcaacgctacctttgccatgtttcagaaacaactctggcgcatcgggcttcccatacaatcgatagattgtcgcacctgattgcccgacattatcgcgagcccatttatacccatataaatcagcatccatgttggaatttaatcgcggcctagagcaagacgtttcccgttgaatatggctcatactcttcctttttcaatattattgaagcatttatcagggttattgtctcatgagcggatacatatttgaatgtatttagaaaaataaacaaataggggttccgcgcacatttccccgaaaagtgccacctgacgtctaagaaaccattattatcatgacattaacctataaaaataggcgtatcacgaggccctttcgtc

SEQ ID NO: 80 - DNA, 3821 bp, Artificial Sequence
  pLMTB8324
tcgcgcgtttcggtgatgacggtgaaaacctctgacacatgcagctcccggagacggtcacagcttgtctgtaagcggatgccgggagcagacaagcccgtcagggcgcgtcagcgggtgttggcgggtgtcggggctggcttaactatgcggcatcagagcagattgtactgagagtgcaccatatgcggtgtgaaataccgcacagatgcgtaaggagaaaataccgcatcaggcgccattcgccattcaggctgcgcaactgttgggaagggcgatcggtgcgggcctcttcgctattacgccagctggcgaaagggggatgtgctgcaaggcgattaagttgggtaacgccagggttttcccagtcacgacgttgtaaaacgacggccagtgaattgacgcgtattgggatatttaaatgcttggcgaggtgcgtgtccagtatacgtcccgcgacagctttaaggcatttgctaaagccttgggtgtcatggatgatctgaagtctggcgtgccccgtgcaggctaccgtggaatcgtgaccttccagttccggggtcgccgggtccacctcgccccgccggagacctggaacggctacgacccgtcctggaattgaagtgtgcggggcaaccacacgcgagggacgaagacaaggataacagaaggcaacgcggcaaaacggaggacggccgcatacaaaaacaaacaaacaaacaggtgagcggacgcacacctgcctgagaagtgcgctgccgcagcgtgtgtgtgtgtgtcgccgcgttgcggtctgtaccctccccccacttcccctgtctgcgtctctctctctctgtgtgtgcgtgggctcattttctccgtttctttttttcgttttgttttgttttatttctcttcgaaaatgagaaaaacgacccgaaaatggtctccgccggcgttgtatctctgccccccccccgctgtcccagagcgtagggtgcaccgtctgctgcttccccagacggcgcgcaggatggggcggcagtctcggaggctgcgacgtgtgtcatgatagctgtgacggcgggtgcgtacggctgcttctatctctgcggcgatgcaccgcctcgtgttgcgttggatttccatccaactcctctccccacccccacccgaggcgtgcgtgtgcggcggtgtgcggtggctcgcacacgacaccttgtgtttccatcgcatgttgcgtcgctcgctgcagttggtgctctgagcgttttcttcccccttctcgcagtctttttaccccttgctttcatactccacagagaaaaaccgctcccgtcttgcagccggggcgtgcctgcgctgcccaccccgcacccatttcctttcctgccgttgtgcgttctgcacatcgttactcatgcgcctgcgtgagcctcttttgtcaggatcggcggctatgcccggagccagtctccagcgggcctgccggttgctcgttgccgtctgcgcgttgcacctgggggtcaccctggtctactacctggctggccgtgacctttcccgcttgccgcagttggtcggtgtatccaccccgctccaggggggctcgaacagcgcatttaaatatcccaatggcgcgccgagcttggctcgagcatggtcatagctgtttcctgtgtgaaattgttatccgctcacaattccacacaacatacgagccggaagcataaagtgtaaagcctggggtgcctaatgagtgagctaactcacattaattgcgttgcgctcactgcccgctttccagtcgggaaacctgtcgtgccagctgcattaatgaatcggccaacgcgcggggagaggcggtttgcgtattgggcgctcttccgcttcctcgctcactgactcgctgcgctcggtcgttcggctgcggcgagcggtatcagctcactcaaaggcggtaatacggttatccacagaatcaggggataacgcaggaaagaacatgtgagcaaaaggccagcaaaaggccaggaaccgtaaaaaggccgcgttgctggcgtttttccataggctccgcccccctgacgagcatcacaaaaatcgacgctcaagtcagaggtggcgaaacccgacaggactataaagataccaggcgtttccccctggaagctccctcgtgcgctctcctgttccgaccctgccgcttaccggatacctgtccgcctttctcccttcgggaagcgtggcgctttctcatagctcacgctgtaggtatctcagttcggtgtaggtcgttcgctccaagctgggctgtgtgcacgaaccccccgttcagcccgaccgctgcgccttatccggtaactatcgtcttgagtccaacccggtaagacacgacttatcgccactggcagcagccactggtaacaggattagcagagcgaggtatgtaggcggtgctacagagttcttgaagtggtggcctaactacggctacactagaagaacagtatttggtatctgcgctctgctgaagccagttaccttcggaaaaagagttggtagctcttgatccggcaaacaaaccaccgctggtagcggtggtttttttgtttgcaagcagcagattacgcgcagaaaaaaaggatctcaagaagatcctttgatcttttctacggggtctgacgctcagtggaacgaaaactcacgttaagggattttggtcatgagattatcaaaaaggatcttcacctagatccttttaaattaaaaatgaagttttaaatcaatctaaagtatatatgagtaaacttggtctgacagttagaaaaactcatcgagcatcaaatgaaactgcaatttattcatatcaggattatcaataccatatttttgaaaaagccgtttctgtaatgaaggagaaaactcaccgaggcagttccataggatggcaagatcctggtatcggtctgcgattccgactcgtccaacatcaatacaacctattaatttcccctcgtcaaaaataaggttatcaagtgagaaatcaccatgagtgacgactgaatccggtgagaatggcaaaagtttatgcatttctttccagacttgttcaacaggccagccattacgctcgtcatcaaaatcactcgcatcaaccaaaccgttattcattcgtgattgcgcctgagcgagacgaaatacgcgatcgctgttaaaaggacaattacaaacaggaatcgaatgcaaccggcgcaggaacactgccagcgcatcaacaatattttcacctgaatcaggatattcttctaatacctggaatgctgttttcccagggatcgcagtggtgagtaaccatgcatcatcaggagtacggataaaatgcttgatggtcggaagaggcataaattccgtcagccagtttagtctgaccatctcatctgtaacatcattggcaacgctacctttgccatgtttcagaaacaactctggcgcatcgggcttcccatacaatcgatagattgtcgcacctgattgcccgacattatcgcgagcccatttatacccatataaatcagcatccatgttggaatttaatcgcggcctagagcaagacgtttcccgttgaatatggctcatactcttcctttttcaatattattgaagcatttatcagggttattgtctcatgagcggatacatatttgaatgtatttagaaaaataaacaaataggggttccgcgcacatttccccgaaaagtgccacctgacgtctaagaaaccattattatcatgacattaacctataaaaataggcgtatcacgaggccctttcgtc

SEQ ID NO: 81 - DNA, 4039 bp, Artificial Sequence
  pLMTB8328
tcgcgcgtttcggtgatgacggtgaaaacctctgacacatgcagctcccggagacggtcacagcttgtctgtaagcggatgccgggagcagacaagcccgtcagggcgcgtcagcgggtgttggcgggtgtcggggctggcttaactatgcggcatcagagcagattgtactgagagtgcaccatatgcggtgtgaaataccgcacagatgcgtaaggagaaaataccgcatcaggcgccattcgccattcaggctgcgcaactgttgggaagggcgatcggtgcgggcctcttcgctattacgccagctggcgaaagggggatgtgctgcaaggcgattaagttgggtaacgccagggttttcccagtcacgacgttgtaaaacgacggccagtgaattgacgcgtattgggatatttaaatatgcgcctgcgtgagcctcttttgtcaggatcggcggctatgcccggagccagtctccagcgggcctgccggttgctcgttgccgtctgcgcgttgcacctgggggtcaccctggtctactacctggctggccgtgacctttcccgcttgccgcagttggtcggtgtatccaccccgctccaggggggctcgaacagcgcagcggcgataggacagtcttcgggcgagctgcgaaccggcggagcgcgcccacccccacccctgggcgcgagttcccagccccgcccgggtggtgacagctcgccggtggtagattcaggaccagggcccgccagtaacctcacgtcagtgccagtaccccacaccacggctttgagcctgcctgcttgcccggaggagagtcctctgcttgtaggaccaatgttgattgaatttaacatgcctgtggacctggagctggtggcgaagcagaatccaaacgtgaaaatgggcggtcggtacgcgcctcgcgattgcgtctcaccgcacaaggtagcgattataataccctttcgcaaccgacaagaacacctgaagtactggctctactatctccaccctgtcctgcagcgccagcagctggactacggcatttacgtgatcaaccaggcgggcgatactatctttaaccgtgcgaagctcctcaatgtagggtttcaggaggctctgaaggactacgactacacatgctttgtctttagcgacgtggatctcattccaatgaatgaccataacgcctaccgctgcttttcccagccgcgccatatctctgtggccatggacaagttcggcttctcgctgccatacgtgcagtacttcggaggcgtgtctgcactgagtaagcaacagttcctgaccattaacggcttccccaacaactattggggctggggcggggaagacgatgacatctttaaccggctggtcttccgaggtatgagcatttcgcgcccaaacgccgtcgtgggacgctgccggatgatacgacacagccgagacaaaaagaacgagcctaatccgcagcgcttcgaccgcatagctcacacgaaggagactatgttgagcgacggcctcaatagcttgacgtatcaggttttggatgtgcagcgttacccactgtacacacagatcactgtggatatcggtacgccttcttaagcagaatttggatgatgcgattacttgagataatttcattttcatcagcaaaaacgaagtgcaacggtatctttggttcaccagaggccggcaaagctcttagggtggtgtaatgggctgttagcgctacggtacactgaagcgatcagctgcggtatctgtgtgagcgtcaagggtgcgctggtttctgcatctccgagatttaaatatcccaatggcgcgccgagcttggctcgagcatggtcatagctgtttcctgtgtgaaattgttatccgctcacaattccacacaacatacgagccggaagcataaagtgtaaagcctggggtgcctaatgagtgagctaactcacattaattgcgttgcgctcactgcccgctttccagtcgggaaacctgtcgtgccagctgcattaatgaatcggccaacgcgcggggagaggcggtttgcgtattgggcgctcttccgcttcctcgctcactgactcgctgcgctcggtcgttcggctgcggcgagcggtatcagctcactcaaaggcggtaatacggttatccacagaatcaggggataacgcaggaaagaacatgtgagcaaaaggccagcaaaaggccaggaaccgtaaaaaggccgcgttgctggcgtttttccataggctccgcccccctgacgagcatcacaaaaatcgacgctcaagtcagaggtggcgaaacccgacaggactataaagataccaggcgtttccccctggaagctccctcgtgcgctctcctgttccgaccctgccgcttaccggatacctgtccgcctttctcccttcgggaagcgtggcgctttctcatagctcacgctgtaggtatctcagttcggtgtaggtcgttcgctccaagctgggctgtgtgcacgaaccccccgttcagcccgaccgctgcgccttatccggtaactatcgtcttgagtccaacccggtaagacacgacttatcgccactggcagcagccactggtaacaggattagcagagcgaggtatgtaggcggtgctacagagttcttgaagtggtggcctaactacggctacactagaagaacagtatttggtatctgcgctctgctgaagccagttaccttcggaaaaagagttggtagctcttgatccggcaaacaaaccaccgctggtagcggtggtttttttgtttgcaagcagcagattacgcgcagaaaaaaaggatctcaagaagatcctttgatcttttctacggggtctgacgctcagtggaacgaaaactcacgttaagggattttggtcatgagattatcaaaaaggatcttcacctagatccttttaaattaaaaatgaagttttaaatcaatctaaagtatatatgagtaaacttggtctgacagttagaaaaactcatcgagcatcaaatgaaactgcaatttattcatatcaggattatcaataccatatttttgaaaaagccgtttctgtaatgaaggagaaaactcaccgaggcagttccataggatggcaagatcctggtatcggtctgcgattccgactcgtccaacatcaatacaacctattaatttcccctcgtcaaaaataaggttatcaagtgagaaatcaccatgagtgacgactgaatccggtgagaatggcaaaagtttatgcatttctttccagacttgttcaacaggccagccattacgctcgtcatcaaaatcactcgcatcaaccaaaccgttattcattcgtgattgcgcctgagcgagacgaaatacgcgatcgctgttaaaaggacaattacaaacaggaatcgaatgcaaccggcgcaggaacactgccagcgcatcaacaatattttcacctgaatcaggatattcttctaatacctggaatgctgttttcccagggatcgcagtggtgagtaaccatgcatcatcaggagtacggataaaatgcttgatggtcggaagaggcataaattccgtcagccagtttagtctgaccatctcatctgtaacatcattggcaacgctacctttgccatgtttcagaaacaactctggcgcatcgggcttcccatacaatcgatagattgtcgcacctgattgcccgacattatcgcgagcccatttatacccatataaatcagcatccatgttggaatttaatcgcggcctagagcaagacgtttcccgttgaatatggctcatactcttcctttttcaatattattgaagcatttatcagggttattgtctcatgagcggatacatatttgaatgtatttagaaaaataaacaaataggggttccgcgcacatttccccgaaaagtgccacctgacgtctaagaaaccattattatcatgacattaacctataaaaataggcgtatcacgaggccctttcgtc

SEQ ID NO: 82 - DNA, 3712 bp, Artificial Sequence
  pLMTB8330
tcgcgcgtttcggtgatgacggtgaaaacctctgacacatgcagctcccggagacggtcacagcttgtctgtaagcggatgccgggagcagacaagcccgtcagggcgcgtcagcgggtgttggcgggtgtcggggctggcttaactatgcggcatcagagcagattgtactgagagtgcaccatatgcggtgtgaaataccgcacagatgcgtaaggagaaaataccgcatcaggcgccattcgccattcaggctgcgcaactgttgggaagggcgatcggtgcgggcctcttcgctattacgccagctggcgaaagggggatgtgctgcaaggcgattaagttgggtaacgccagggttttcccagtcacgacgttgtaaaacgacggccagtgaattgacgcgtattgggatatttaaatgcagaatttggatgatgcgattacttgagataatttcattttcatcagcaaaaacgaagtgcaacggtatctttggttcaccagaggccggcaaagctcttagggtggtgtaatgggctgttagcgctacggtacactgaagcgatcagctgcggtatctgtgtgagcgtcaagggtgcgctggtttctgcatctccgagtttttgattcgctctgaggatgtatcgcaaaaagcacgctgcggtgctgctttactactcctgcgctgctgctccttcaaatgcgtcgacatgtccgattttctgcagctactcgcctccactttcatctctccctcttccttgttgttttctgtgtgtccatgcgccttgtgtgcgtctcaacttgcgacaacttttctttcgcgtctctgtggaataacatctgaacagctttagggcttcattcgcaacggatcatgaaaaagcctgaactcaccgcgacgtctgtcgagaagtttctgatcgaaaagttcgacagcgtctccgacctgatgcagctctcggagggcgaagaatctcgtgctttcagcttcgatgtaggagggcgtggatatgtcctgcgggtaaatagctgcgccgatggtttctacaaagatcgttatgtttatcggcactttgcatcggccgcgctcccgattccggaagtgcttgacattggggaattcagcgagagcctgacctattgcatctcccgccgtgcacagggtgtcacgttgcaagacctgcctgaaaccgaactgcccgctgttctgcagccggtcgcggaggcgatggatgcgatcgctgcggccgatcttagccagacgagcgggttcggcccattcggaccgcaaggaatcggtcaatacactacatggcgtgatttcatatgcgcgattgctgatccccatgtgtatcactggcaaactgtgatggacgacaccgtcagtgcgtccgtcgcgcaggctctcgatgagctgatgctttgggccgaggactgccccgaagtccggcacctcgtgcacgcggatttcggctccaacaatgtccatttaaatatcccaatggcgcgccgagcttggctcgagcatggtcatagctgtttcctgtgtgaaattgttatccgctcacaattccacacaacatacgagccggaagcataaagtgtaaagcctggggtgcctaatgagtgagctaactcacattaattgcgttgcgctcactgcccgctttccagtcgggaaacctgtcgtgccagctgcattaatgaatcggccaacgcgcggggagaggcggtttgcgtattgggcgctcttccgcttcctcgctcactgactcgctgcgctcggtcgttcggctgcggcgagcggtatcagctcactcaaaggcggtaatacggttatccacagaatcaggggataacgcaggaaagaacatgtgagcaaaaggccagcaaaaggccaggaaccgtaaaaaggccgcgttgctggcgtttttccataggctccgcccccctgacgagcatcacaaaaatcgacgctcaagtcagaggtggcgaaacccgacaggactataaagataccaggcgtttccccctggaagctccctcgtgcgctctcctgttccgaccctgccgcttaccggatacctgtccgcctttctcccttcgggaagcgtggcgctttctcatagctcacgctgtaggtatctcagttcggtgtaggtcgttcgctccaagctgggctgtgtgcacgaaccccccgttcagcccgaccgctgcgccttatccggtaactatcgtcttgagtccaacccggtaagacacgacttatcgccactggcagcagccactggtaacaggattagcagagcgaggtatgtaggcggtgctacagagttcttgaagtggtggcctaactacggctacactagaagaacagtatttggtatctgcgctctgctgaagccagttaccttcggaaaaagagttggtagctcttgatccggcaaacaaaccaccgctggtagcggtggtttttttgtttgcaagcagcagattacgcgcagaaaaaaaggatctcaagaagatcctttgatcttttctacggggtctgacgctcagtggaacgaaaactcacgttaagggattttggtcatgagattatcaaaaaggatcttcacctagatccttttaaattaaaaatgaagttttaaatcaatctaaagtatatatgagtaaacttggtctgacagttagaaaaactcatcgagcatcaaatgaaactgcaatttattcatatcaggattatcaataccatatttttgaaaaagccgtttctgtaatgaaggagaaaactcaccgaggcagttccataggatggcaagatcctggtatcggtctgcgattccgactcgtccaacatcaatacaacctattaatttcccctcgtcaaaaataaggttatcaagtgagaaatcaccatgagtgacgactgaatccggtgagaatggcaaaagtttatgcatttctttccagacttgttcaacaggccagccattacgctcgtcatcaaaatcactcgcatcaaccaaaccgttattcattcgtgattgcgcctgagcgagacgaaatacgcgatcgctgttaaaaggacaattacaaacaggaatcgaatgcaaccggcgcaggaacactgccagcgcatcaacaatattttcacctgaatcaggatattcttctaatacctggaatgctgttttcccagggatcgcagtggtgagtaaccatgcatcatcaggagtacggataaaatgcttgatggtcggaagaggcataaattccgtcagccagtttagtctgaccatctcatctgtaacatcattggcaacgctacctttgccatgtttcagaaacaactctggcgcatcgggcttcccatacaatcgatagattgtcgcacctgattgcccgacattatcgcgagcccatttatacccatataaatcagcatccatgttggaatttaatcgcggcctagagcaagacgtttcccgttgaatatggctcatactcttcctttttcaatattattgaagcatttatcagggttattgtctcatgagcggatacatatttgaatgtatttagaaaaataaacaaataggggttccgcgcacatttccccgaaaagtgccacctgacgtctaagaaaccattattatcatgacattaacctataaaaataggcgtatcacgaggccctttcgtc

SEQ ID NO: 83 - DNA, 4009 bp, Artificial Sequence
  pLMTB8334
tcgcgcgtttcggtgatgacggtgaaaacctctgacacatgcagctcccggagacggtcacagcttgtctgtaagcggatgccgggagcagacaagcccgtcagggcgcgtcagcgggtgttggcgggtgtcggggctggcttaactatgcggcatcagagcagattgtactgagagtgcaccatatgcggtgtgaaataccgcacagatgcgtaaggagaaaataccgcatcaggcgccattcgccattcaggctgcgcaactgttgggaagggcgatcggtgcgggcctcttcgctattacgccagctggcgaaagggggatgtgctgcaaggcgattaagttgggtaacgccagggttttcccagtcacgacgttgtaaaacgacggccagtgaattgacgcgtattgggatatttaaatgcagcggccccttccgagtacagtactcgagccgagacagtttcaaggtccttgcccgcaacctcggggtgatggatgacctgaagtcaggcgtgccacgcgccggttaccgcggcgtggtctcgttcatatctcgcggccggcgcatctacctcgcgccccctgagggttggacgaaatacgacgtgagctggagctaagcggtcattacgatgatgagagaatacgtggtcgggggaaggaagaggacagtggtactctgcatgtgcttgggcaccgtgtcttttggacgagtagacggtgccaggtgggggaagggggaagggagtttgggcgatgaggtagtcgaggcacagcacacgttcatgtggctgtctgcatgtagaatatgccgatgtcggtgagctcagctctcgcaggcgcataccctacattggcccgctgccgcgcgtgtgctgcccattctctccacctcacctccactcgtatcgttgcctcatctctgagcgggtcgcctgcgctccttcttccgcccctccccttcgccgtctccatcagtcaagtccatcggaccgccgcgaagtctggctgctgttcgttggtgcatttcgggcagcgacggtgtggcgtgggtgtgtgtctctcgggcacacggcacgcatacgagagcgtgatggagagttcgctggatagtgtgcatacatgcatgcatactggagtacttttcgtcccaccaccctccgcgtacacgcgtatcgatgcctgcgcgtgcgtgtgtgggggcttctctcttacacgttttctttgttttttttttggtttcctcgtttcttctttcaacggtacaccgccatgaaaagaaacaacaccagacgcgagagcatcccgccgctgcattggcgacccgatgctaacgaggatgatgatgcggatggaaagggagggggaggaggaagaggagatgatcgttcatgacggccgacatggaagttgggcgaaggaaggaagaaaggcgggacgcgcgtaaacgcacacgtccatccttctctttctctgtgtatgtatgtgtgtgtgtgtgtgcccaacgcgtagaaccccatcatcacctccaacttcccccccccacccacccacccacccgcctcttctttccattttgatgctgcgatgcggttccggatttacaagcgcaaagtggtcatcttgaccctcgtcgtgattatatgcggttttgcagtgtggaacagtggcaaaccgaagaaggccagcacggtgtttccgaaagaggtggagacagtgaagcgcagtagtgtgggcagccaaatccaggcgaccattcctgtcacgcggaagccgatcaacgagtcatttaaatatcccaatggcgcgccgagcttggctcgagcatggtcatagctgtttcctgtgtgaaattgttatccgctcacaattccacacaacatacgagccggaagcataaagtgtaaagcctggggtgcctaatgagtgagctaactcacattaattgcgttgcgctcactgcccgctttccagtcgggaaacctgtcgtgccagctgcattaatgaatcggccaacgcgcggggagaggcggtttgcgtattgggcgctcttccgcttcctcgctcactgactcgctgcgctcggtcgttcggctgcggcgagcggtatcagctcactcaaaggcggtaatacggttatccacagaatcaggggataacgcaggaaagaacatgtgagcaaaaggccagcaaaaggccaggaaccgtaaaaaggccgcgttgctggcgtttttccataggctccgcccccctgacgagcatcacaaaaatcgacgctcaagtcagaggtggcgaaacccgacaggactataaagataccaggcgtttccccctggaagctccctcgtgcgctctcctgttccgaccctgccgcttaccggatacctgtccgcctttctcccttcgggaagcgtggcgctttctcatagctcacgctgtaggtatctcagttcggtgtaggtcgttcgctccaagctgggctgtgtgcacgaaccccccgttcagcccgaccgctgcgccttatccggtaactatcgtcttgagtccaacccggtaagacacgacttatcgccactggcagcagccactggtaacaggattagcagagcgaggtatgtaggcggtgctacagagttcttgaagtggtggcctaactacggctacactagaagaacagtatttggtatctgcgctctgctgaagccagttaccttcggaaaaagagttggtagctcttgatccggcaaacaaaccaccgctggtagcggtggtttttttgtttgcaagcagcagattacgcgcagaaaaaaaggatctcaagaagatcctttgatcttttctacggggtctgacgctcagtggaacgaaaactcacgttaagggattttggtcatgagattatcaaaaaggatcttcacctagatccttttaaattaaaaatgaagttttaaatcaatctaaagtatatatgagtaaacttggtctgacagttagaaaaactcatcgagcatcaaatgaaactgcaatttattcatatcaggattatcaataccatatttttgaaaaagccgtttctgtaatgaaggagaaaactcaccgaggcagttccataggatggcaagatcctggtatcggtctgcgattccgactcgtccaacatcaatacaacctattaatttcccctcgtcaaaaataaggttatcaagtgagaaatcaccatgagtgacgactgaatccggtgagaatggcaaaagtttatgcatttctttccagacttgttcaacaggccagccattacgctcgtcatcaaaatcactcgcatcaaccaaaccgttattcattcgtgattgcgcctgagcgagacgaaatacgcgatcgctgttaaaaggacaattacaaacaggaatcgaatgcaaccggcgcaggaacactgccagcgcatcaacaatattttcacctgaatcaggatattcttctaatacctggaatgctgttttcccagggatcgcagtggtgagtaaccatgcatcatcaggagtacggataaaatgcttgatggtcggaagaggcataaattccgtcagccagtttagtctgaccatctcatctgtaacatcattggcaacgctacctttgccatgtttcagaaacaactctggcgcatcgggcttcccatacaatcgatagattgtcgcacctgattgcccgacattatcgcgagcccatttatacccatataaatcagcatccatgttggaatttaatcgcggcctagagcaagacgtttcccgttgaatatggctcatactcttcctttttcaatattattgaagcatttatcagggttattgtctcatgagcggatacatatttgaatgtatttagaaaaataaacaaataggggttccgcgcacatttccccgaaaagtgccacctgacgtctaagaaaccattattatcatgacattaacctataaaaataggcgtatcacgaggccctttcgtc

SEQ ID NO: 84 - DNA, 3951 bp, Artificial Sequence
  pLMTB8335
tcgcgcgtttcggtgatgacggtgaaaacctctgacacatgcagctcccggagacggtcacagcttgtctgtaagcggatgccgggagcagacaagcccgtcagggcgcgtcagcgggtgttggcgggtgtcggggctggcttaactatgcggcatcagagcagattgtactgagagtgcaccatatgcggtgtgaaataccgcacagatgcgtaaggagaaaataccgcatcaggcgccattcgccattcaggctgcgcaactgttgggaagggcgatcggtgcgggcctcttcgctattacgccagctggcgaaagggggatgtgctgcaaggcgattaagttgggtaacgccagggttttcccagtcacgacgttgtaaaacgacggccagtgaattgacgcgtattgggatatttaaatctgcatgccgagcggccagaagacaaagattgagaacgtgctccagaatagcggtaatcagctcttccctaagcagctcttgatcacgaagcgactgcccgcgtcgggggcgaagggcgtagccccccatgtgaagaacggcggttggggcgacatccgggaccacgaactgtgcaagtcttacctgcgccttcagtaggctctcgcagcagcgtgaaacgcgtggggaaacgggtgcgtgcgtctgtgtgtgcgtgttcaaatggcatccgcagcgtgccgcgcgcacccgtgcccgagcacctctgggatgaacgacctctctcgtcgattgaacgcgatgtcaccaatggcagtcatcttttttcccccttttttcacgggcgctctgtggcgtgcgcctttcatttcttgttttgacccctcggcaaagaaccaaaagaagcaggggtcggccgtgtagcaggcacccacccgctccgcctccgtcccctctcgcacgcaccgcctcaagacgcggtgcatcgcctgcgcgccgtcttgcgcacacaactgcgttctgttgtcacggctgttccttgcgcgcgcgcgcgtgcgtcgttgacgactctctccgacgcaccaccgatgagcaccctctggatgagggcacgcacgtatgtatacacgcatgttgtgtgcctatgcacgtatgtatgctcctgcgcagtctctctcgcctcgcctcttacgtcattgcttcgccctcgccatacctgcagcggtgcgtgcgtgtattgtgtaagttttcgcacgcgagcggagagctgctacgcagcagcgacgcagtcgagtgcgtgactacgctggcacaccggcgctaactagcgtgtttgccccaccaacaccaacaacaccctaagccttggcgcacccttctccatagacacacgcacaggccacataagccgttgcgcgcatcttctccggaggccggtgagcgcctcttgttgttgtgtcttccgatctccctctctcatccattcaacagatccgcaaacctcgcatactgcgcgcgcacgctcatcacggtactggcagcaacagcaacggtgaccgcgagcgaggccatgctgaagaagcagtccgccgggttggtgctgtggggcgcaataatctttgttggctggaacgcgctccttctgctttttttctggacccgccctgcccccggacgcctcccttcggacagcgctctcggggacgaccccgcaagccttacgcgtgaagtcattcacctggcagaggatgctgaggcggagcttgagcgatttaaatatcccaatggcgcgccgagcttggctcgagcatggtcatagctgtttcctgtgtgaaattgttatccgctcacaattccacacaacatacgagccggaagcataaagtgtaaagcctggggtgcctaatgagtgagctaactcacattaattgcgttgcgctcactgcccgctttccagtcgggaaacctgtcgtgccagctgcattaatgaatcggccaacgcgcggggagaggcggtttgcgtattgggcgctcttccgcttcctcgctcactgactcgctgcgctcggtcgttcggctgcggcgagcggtatcagctcactcaaaggcggtaatacggttatccacagaatcaggggataacgcaggaaagaacatgtgagcaaaaggccagcaaaaggccaggaaccgtaaaaaggccgcgttgctggcgtttttccataggctccgcccccctgacgagcatcacaaaaatcgacgctcaagtcagaggtggcgaaacccgacaggactataaagataccaggcgtttccccctggaagctccctcgtgcgctctcctgttccgaccctgccgcttaccggatacctgtccgcctttctcccttcgggaagcgtggcgctttctcatagctcacgctgtaggtatctcagttcggtgtaggtcgttcgctccaagctgggctgtgtgcacgaaccccccgttcagcccgaccgctgcgccttatccggtaactatcgtcttgagtccaacccggtaagacacgacttatcgccactggcagcagccactggtaacaggattagcagagcgaggtatgtaggcggtgctacagagttcttgaagtggtggcctaactacggctacactagaagaacagtatttggtatctgcgctctgctgaagccagttaccttcggaaaaagagttggtagctcttgatccggcaaacaaaccaccgctggtagcggtggtttttttgtttgcaagcagcagattacgcgcagaaaaaaaggatctcaagaagatcctttgatcttttctacggggtctgacgctcagtggaacgaaaactcacgttaagggattttggtcatgagattatcaaaaaggatcttcacctagatccttttaaattaaaaatgaagttttaaatcaatctaaagtatatatgagtaaacttggtctgacagttagaaaaactcatcgagcatcaaatgaaactgcaatttattcatatcaggattatcaataccatatttttgaaaaagccgtttctgtaatgaaggagaaaactcaccgaggcagttccataggatggcaagatcctggtatcggtctgcgattccgactcgtccaacatcaatacaacctattaatttcccctcgtcaaaaataaggttatcaagtgagaaatcaccatgagtgacgactgaatccggtgagaatggcaaaagtttatgcatttctttccagacttgttcaacaggccagccattacgctcgtcatcaaaatcactcgcatcaaccaaaccgttattcattcgtgattgcgcctgagcgagacgaaatacgcgatcgctgttaaaaggacaattacaaacaggaatcgaatgcaaccggcgcaggaacactgccagcgcatcaacaatattttcacctgaatcaggatattcttctaatacctggaatgctgttttcccagggatcgcagtggtgagtaaccatgcatcatcaggagtacggataaaatgcttgatggtcggaagaggcataaattccgtcagccagtttagtctgaccatctcatctgtaacatcattggcaacgctacctttgccatgtttcagaaacaactctggcgcatcgggcttcccatacaatcgatagattgtcgcacctgattgcccgacattatcgcgagcccatttatacccatataaatcagcatccatgttggaatttaatcgcggcctagagcaagacgtttcccgttgaatatggctcatactcttcctttttcaatattattgaagcatttatcagggttattgtctcatgagcggatacatatttgaatgtatttagaaaaataaacaaataggggttccgcgcacatttccccgaaaagtgccacctgacgtctaagaaaccattattatcatgacattaacctataaaaataggcgtatcacgaggccctttcgtc

SEQ ID NO: 85 - DNA, 3640 bp, Artificial Sequence
  pLMTB8336
tcgcgcgtttcggtgatgacggtgaaaacctctgacacatgcagctcccggagacggtcacagcttgtctgtaagcggatgccgggagcagacaagcccgtcagggcgcgtcagcgggtgttggcgggtgtcggggctggcttaactatgcggcatcagagcagattgtactgagagtgcaccatatgcggtgtgaaataccgcacagatgcgtaaggagaaaataccgcatcaggcgccattcgccattcaggctgcgcaactgttgggaagggcgatcggtgcgggcctcttcgctattacgccagctggcgaaagggggatgtgctgcaaggcgattaagttgggtaacgccagggttttcccagtcacgacgttgtaaaacgacggccagtgaattgacgcgtattgggatatttaaatgcttggcgaggtgcgtgtccagtatacgtcccgcgacagctttaaggcatttgctaaagccttgggtgtcatggatgatctgaagtctggcgtgccccgtgcaggctaccgtggaatcgtgaccttccagttccggggtcgccgggtccacctcgccccgccggagacctggaacggctacgacccgtcctggaattgaggaggtggtcattccatgattatcttggtttccttcattttttttatgcgtgtgcttactttaaaaaagaagcaaagaagtagtcagtagaatcagtacgaccacgtcgggaactgacacgcgccgtgacggatttcggctatgtttgtggagcacacctgtaggggaaaaaaggacatctctccgcaggcacaccggcgatttccctcgacagcgttcagtgaaccccctggcgagtctcgttgaaaccacaggcacgtcctagacgcgttgggtcccttcgacgagaagctctctctctcattccctgcaactcatcctctgtgacttctcttacttgtttttattctcaccgggccgcccccccccccctcacactcccccttccctctctccctgaggatggcaaaagcgcttaacaagcaaacggcatccaagcctctcctccgcacggcagttatcctggaaggaacggggccgtaccttgacctaagacactcatacacggtgcagggcgttgcgtagaagggctgttgaacaaggcgggttcaacccggtcacaccgttgtgtcgccgctgtagacgccctggtagaggcgatgcgcctgcgtgagcctcttttgtcaggatcggcggctatgcccggagccagtctccagcgggcctgccggttgctcgttgccgtctgcgcgttgcacctgggggtcaccctggtctactacctggctggccgtgacctttcccgcttgccgcagttggtcggtgtatccaccccgctccaggggggctcgaacagcgcatttaaatatcccaatggcgcgccgagcttggctcgagcatggtcatagctgtttcctgtgtgaaattgttatccgctcacaattccacacaacatacgagccggaagcataaagtgtaaagcctggggtgcctaatgagtgagctaactcacattaattgcgttgcgctcactgcccgctttccagtcgggaaacctgtcgtgccagctgcattaatgaatcggccaacgcgcggggagaggcggtttgcgtattgggcgctcttccgcttcctcgctcactgactcgctgcgctcggtcgttcggctgcggcgagcggtatcagctcactcaaaggcggtaatacggttatccacagaatcaggggataacgcaggaaagaacatgtgagcaaaaggccagcaaaaggccaggaaccgtaaaaaggccgcgttgctggcgtttttccataggctccgcccccctgacgagcatcacaaaaatcgacgctcaagtcagaggtggcgaaacccgacaggactataaagataccaggcgtttccccctggaagctccctcgtgcgctctcctgttccgaccctgccgcttaccggatacctgtccgcctttctcccttcgggaagcgtggcgctttctcatagctcacgctgtaggtatctcagttcggtgtaggtcgttcgctccaagctgggctgtgtgcacgaaccccccgttcagcccgaccgctgcgccttatccggtaactatcgtcttgagtccaacccggtaagacacgacttatcgccactggcagcagccactggtaacaggattagcagagcgaggtatgtaggcggtgctacagagttcttgaagtggtggcctaactacggctacactagaagaacagtatttggtatctgcgctctgctgaagccagttaccttcggaaaaagagttggtagctcttgatccggcaaacaaaccaccgctggtagcggtggtttttttgtttgcaagcagcagattacgcgcagaaaaaaaggatctcaagaagatcctttgatcttttctacggggtctgacgctcagtggaacgaaaactcacgttaagggattttggtcatgagattatcaaaaaggatcttcacctagatccttttaaattaaaaatgaagttttaaatcaatctaaagtatatatgagtaaacttggtctgacagttagaaaaactcatcgagcatcaaatgaaactgcaatttattcatatcaggattatcaataccatatttttgaaaaagccgtttctgtaatgaaggagaaaactcaccgaggcagttccataggatggcaagatcctggtatcggtctgcgattccgactcgtccaacatcaatacaacctattaatttcccctcgtcaaaaataaggttatcaagtgagaaatcaccatgagtgacgactgaatccggtgagaatggcaaaagtttatgcatttctttccagacttgttcaacaggccagccattacgctcgtcatcaaaatcactcgcatcaaccaaaccgttattcattcgtgattgcgcctgagcgagacgaaatacgcgatcgctgttaaaaggacaattacaaacaggaatcgaatgcaaccggcgcaggaacactgccagcgcatcaacaatattttcacctgaatcaggatattcttctaatacctggaatgctgttttcccagggatcgcagtggtgagtaaccatgcatcatcaggagtacggataaaatgcttgatggtcggaagaggcataaattccgtcagccagtttagtctgaccatctcatctgtaacatcattggcaacgctacctttgccatgtttcagaaacaactctggcgcatcgggcttcccatacaatcgatagattgtcgcacctgattgcccgacattatcgcgagcccatttatacccatataaatcagcatccatgttggaatttaatcgcggcctagagcaagacgtttcccgttgaatatggctcatactcttcctttttcaatattattgaagcatttatcagggttattgtctcatgagcggatacatatttgaatgtatttagaaaaataaacaaataggggttccgcgcacatttccccgaaaagtgccacctgacgtctaagaaaccattattatcatgacattaacctataaaaataggcgtatcacgaggccctttcgtc

SEQ ID NO: 86 - DNA, 3986 bp, Artificial Sequence
  pLMTB8379
tcgcgcgtttcggtgatgacggtgaaaacctctgacacatgcagctcccggagacggtcacagcttgtctgtaagcggatgccgggagcagacaagcccgtcagggcgcgtcagcgggtgttggcgggtgtcggggctggcttaactatgcggcatcagagcagattgtactgagagtgcaccatatgcggtgtgaaataccgcacagatgcgtaaggagaaaataccgcatcaggcgccattcgccattcaggctgcgcaactgttgggaagggcgatcggtgcgggcctcttcgctattacgccagctggcgaaagggggatgtgctgcaaggcgattaagttgggtaacgccagggttttcccagtcacgacgttgtaaaacgacggccagtgaattgacgcgtattgggatatttaaatatgcggttccgcatttataagcgcaaggtcttgatcctgacgctggtcgtcgccgcatgcggatttgtgctgtggagctcgaacggtcgccagcgcaagaacgaagcgctcgccccgccgctgcttgacgcggagcctgcacgaggcgcgggtggccgtggcggcgaccacccgagcgtggcggtgggtatccgccgcgtgtcaaacgtctcagccgcatcattggtgccagccgtgccccagccagaggcggacaacctcacattgcgctaccgatccttggtctaccaacttaactttgaccaaacgttgcgcaacgtcgacaaggcaggtacttgggctccacgcgagcttgtgttggtcgtccaggtgcataatcgtccggagtaccttcgcctcctgctggactcccttcgcaaggcacaaggcatcgacaacgtgctggttattttcagccacgacttttggtccaccgagatcaatcaacttatcgcgggcgtgaacttctgtccagtgctccaggttttcttcccgttctccatccagctgtaccccaacgaattcccaggatccgacccgcgagactgtccacgggacctcccgaagaacgccgctttgaagcttggttgcattaacgcggaatacccggatagcttcggtcactaccgagaggccaaattctctcagacgaagcaccactggtggtggaaattgcacttcgtgtgggaacgtgttaagatcctgcgtgactacgccggcctcatattgttcttggaggaggaccactacctcgcccccgatttttaccacgtgttcaagaaaatgtggaaactgaagcagcaggagtgtcctgagtgtgatgtgctgagtctcggaacctactcagccagccgctctttctacggcatggccgacaaggttgacgtgaaaacctggaagagcactgagcacaatatgggtctggcacttacgcgcaacgcgtaccagaagttgatagagtgcaccgacacgttctgtacgtacgacgattataactgggactggacgctccagtacctgaccgtgagctgcctccctaagttttggaaagtgctggttccgcagatcccacgtatcttccacgcaggggactgcggcatgcaccacaaaaagacgtgtcgtccatcgacgcaatctgcccaaatcgagtcgcttctgaacaataacaagcagtacatgtttcccgaaacgctcactatctcggagaagtttaccgtcgtggccatatcaccgccacgcaagaatggcggctggggcgacatacgcgatcatgaattgtgtaagtcgtatcgccgcctgcagtgaatttaaatatcccaatggcgcgccgagcttggctcgagcatggtcatagctgtttcctgtgtgaaattgttatccgctcacaattccacacaacatacgagccggaagcataaagtgtaaagcctggggtgcctaatgagtgagctaactcacattaattgcgttgcgctcactgcccgctttccagtcgggaaacctgtcgtgccagctgcattaatgaatcggccaacgcgcggggagaggcggtttgcgtattgggcgctcttccgcttcctcgctcactgactcgctgcgctcggtcgttcggctgcggcgagcggtatcagctcactcaaaggcggtaatacggttatccacagaatcaggggataacgcaggaaagaacatgtgagcaaaaggccagcaaaaggccaggaaccgtaaaaaggccgcgttgctggcgtttttccataggctccgcccccctgacgagcatcacaaaaatcgacgctcaagtcagaggtggcgaaacccgacaggactataaagataccaggcgtttccccctggaagctccctcgtgcgctctcctgttccgaccctgccgcttaccggatacctgtccgcctttctcccttcgggaagcgtggcgctttctcatagctcacgctgtaggtatctcagttcggtgtaggtcgttcgctccaagctgggctgtgtgcacgaaccccccgttcagcccgaccgctgcgccttatccggtaactatcgtcttgagtccaacccggtaagacacgacttatcgccactggcagcagccactggtaacaggattagcagagcgaggtatgtaggcggtgctacagagttcttgaagtggtggcctaactacggctacactagaagaacagtatttggtatctgcgctctgctgaagccagttaccttcggaaaaagagttggtagctcttgatccggcaaacaaaccaccgctggtagcggtggtttttttgtttgcaagcagcagattacgcgcagaaaaaaaggatctcaagaagatcctttgatcttttctacggggtctgacgctcagtggaacgaaaactcacgttaagggattttggtcatgagattatcaaaaaggatcttcacctagatccttttaaattaaaaatgaagttttaaatcaatctaaagtatatatgagtaaacttggtctgacagttagaaaaactcatcgagcatcaaatgaaactgcaatttattcatatcaggattatcaataccatatttttgaaaaagccgtttctgtaatgaaggagaaaactcaccgaggcagttccataggatggcaagatcctggtatcggtctgcgattccgactcgtccaacatcaatacaacctattaatttcccctcgtcaaaaataaggttatcaagtgagaaatcaccatgagtgacgactgaatccggtgagaatggcaaaagtttatgcatttctttccagacttgttcaacaggccagccattacgctcgtcatcaaaatcactcgcatcaaccaaaccgttattcattcgtgattgcgcctgagcgagacgaaatacgcgatcgctgttaaaaggacaattacaaacaggaatcgaatgcaaccggcgcaggaacactgccagcgcatcaacaatattttcacctgaatcaggatattcttctaatacctggaatgctgttttcccagggatcgcagtggtgagtaaccatgcatcatcaggagtacggataaaatgcttgatggtcggaagaggcataaattccgtcagccagtttagtctgaccatctcatctgtaacatcattggcaacgctacctttgccatgtttcagaaacaactctggcgcatcgggcttcccatacaatcgatagattgtcgcacctgattgcccgacattatcgcgagcccatttatacccatataaatcagcatccatgttggaatttaatcgcggcctagagcaagacgtttcccgttgaatatggctcatactcttcctttttcaatattattgaagcatttatcagggttattgtctcatgagcggatacatatttgaatgtatttagaaaaataaacaaataggggttccgcgcacatttccccgaaaagtgccacctgacgtctaagaaaccattattatcatgacattaacctataaaaataggcgtatcacgaggccctttcgtc

SEQ ID NO: 87 - DNA, 4243 bp, Artificial Sequence
  pLMTB8383
tcgcgcgtttcggtgatgacggtgaaaacctctgacacatgcagctcccggagacggtcacagcttgtctgtaagcggatgccgggagcagacaagcccgtcagggcgcgtcagcgggtgttggcgggtgtcggggctggcttaactatgcggcatcagagcagattgtactgagagtgcaccatatgcggtgtgaaataccgcacagatgcgtaaggagaaaataccgcatcaggcgccattcgccattcaggctgcgcaactgttgggaagggcgatcggtgcgggcctcttcgctattacgccagctggcgaaagggggatgtgctgcaaggcgattaagttgggtaacgccagggttttcccagtcacgacgttgtaaaacgacggccagtgaattgacgcgtattgggatatttaaatatgcgaccacgtaagaccatactgctcgtgggtgtcctggtgatatgggtgcttatgacctaccttgcctttatgcggagcgttcggggcacagacgggtcgcgcccacgcccggctttcgccagtaataagctcatgctcgagaaggtacaggatttcgagcagaacctgaagtcgttcgccgacagccgtcagaatctgtatcgcgacatcattaacatcctgcgccggacagacaaggtgagttctgtgccagctcagccgataccggctgtaccgtcgcaagagtcccctggcgcggccgtgcaggagagcgaggtcccgaaggagcgccaagcgccgccgcaacgctacctgaacaacgatccagccttcccggtgatccctgtggtcgtttttgcttgcaaccgcatttctgtcaacaagtgccttgacgatcttatccgctatcgaccctcggccgaacaattccctatcattgtgtcacaagactgtgacgatgaagcgacgcgtaatacgattctgagctaccgtgacgaagtgactctgattcagcagcctgaccagtcagatatcccggtgccgcctaaggagaagaaatacaagggctactacaagatttcgcggcactacggctgggcgctccgcgcagtgttcggtcaaggcttcgattccgtcattttggttgaggacgacctctcggttgctcctgacttctacgaatactttctcggaacctaccctatcctgaagcgtgataagtccctctggtgtgtatccgcatggaacgacaatggcaaggagggtctcatcgacacgacggcgcacgaccttttgtaccgctcggatttttttcctggcctgggctggatgatgacaaaggatttgtgggacgagctggagccgaagtggccaaaggcgttttgggacgactggatccgccagccagaacaacgcaaggagcgcgcctgcatccggcccgagcttccacgtacccgcacgttcggcaagatcggcgtttctaacggcctgttttttgacaagcatctgaagtttattaagctgagtgaggagttcgtgtcctttaccaagacgaaccttagctacctcgtgaagagtgcgtacgatgatgcgtttctgaagacagtgtaccaaagtcctgtagtgactcttgacgagctcaaacggggcatggtcatgacacgcgagccaattcgtatcgcttaccatacaaaggagcagtataagcgcgccactaaaaacctgggtctgatggacgacttcaagagcggcgttcctcgtacggcttaccgcggcgtggtgtcattcttttataatggccaacgggtatatctcgcgccctctgcgaactggaagggctacgatcttacgtggtcgtgaggtagactcgtgccgcgcgctgatgatgtaggtgcacgcgtgcgtgtgctgcagcggagccgccgccaccgcgactgtgtgtgtgtgcgcgcgtgacgaccggctcgaggaaggaggagcgcgcgtgtgcgtgcgatgcgcctcctctttttttttcgccctcgtcggtttttttttttctgagaggacggcggcggcggatttaaatatcccaatggcgcgccgagcttggctcgagcatggtcatagctgtttcctgtgtgaaattgttatccgctcacaattccacacaacatacgagccggaagcataaagtgtaaagcctggggtgcctaatgagtgagctaactcacattaattgcgttgcgctcactgcccgctttccagtcgggaaacctgtcgtgccagctgcattaatgaatcggccaacgcgcggggagaggcggtttgcgtattgggcgctcttccgcttcctcgctcactgactcgctgcgctcggtcgttcggctgcggcgagcggtatcagctcactcaaaggcggtaatacggttatccacagaatcaggggataacgcaggaaagaacatgtgagcaaaaggccagcaaaaggccaggaaccgtaaaaaggccgcgttgctggcgtttttccataggctccgcccccctgacgagcatcacaaaaatcgacgctcaagtcagaggtggcgaaacccgacaggactataaagataccaggcgtttccccctggaagctccctcgtgcgctctcctgttccgaccctgccgcttaccggatacctgtccgcctttctcccttcgggaagcgtggcgctttctcatagctcacgctgtaggtatctcagttcggtgtaggtcgttcgctccaagctgggctgtgtgcacgaaccccccgttcagcccgaccgctgcgccttatccggtaactatcgtcttgagtccaacccggtaagacacgacttatcgccactggcagcagccactggtaacaggattagcagagcgaggtatgtaggcggtgctacagagttcttgaagtggtggcctaactacggctacactagaagaacagtatttggtatctgcgctctgctgaagccagttaccttcggaaaaagagttggtagctcttgatccggcaaacaaaccaccgctggtagcggtggtttttttgtttgcaagcagcagattacgcgcagaaaaaaaggatctcaagaagatcctttgatcttttctacggggtctgacgctcagtggaacgaaaactcacgttaagggattttggtcatgagattatcaaaaaggatcttcacctagatccttttaaattaaaaatgaagttttaaatcaatctaaagtatatatgagtaaacttggtctgacagttagaaaaactcatcgagcatcaaatgaaactgcaatttattcatatcaggattatcaataccatatttttgaaaaagccgtttctgtaatgaaggagaaaactcaccgaggcagttccataggatggcaagatcctggtatcggtctgcgattccgactcgtccaacatcaatacaacctattaatttcccctcgtcaaaaataaggttatcaagtgagaaatcaccatgagtgacgactgaatccggtgagaatggcaaaagtttatgcatttctttccagacttgttcaacaggccagccattacgctcgtcatcaaaatcactcgcatcaaccaaaccgttattcattcgtgattgcgcctgagcgagacgaaatacgcgatcgctgttaaaaggacaattacaaacaggaatcgaatgcaaccggcgcaggaacactgccagcgcatcaacaatattttcacctgaatcaggatattcttctaatacctggaatgctgttttcccagggatcgcagtggtgagtaaccatgcatcatcaggagtacggataaaatgcttgatggtcggaagaggcataaattccgtcagccagtttagtctgaccatctcatctgtaacatcattggcaacgctacctttgccatgtttcagaaacaactctggcgcatcgggcttcccatacaatcgatagattgtcgcacctgattgcccgacattatcgcgagcccatttatacccatataaatcagcatccatgttggaatttaatcgcggcctagagcaagacgtttcccgttgaatatggctcatactcttcctttttcaatattattgaagcatttatcagggttattgtctcatgagcggatacatatttgaatgtatttagaaaaataaacaaataggggttccgcgcacatttccccgaaaagtgccacctgacgtctaagaaaccattattatcatgacattaacctataaaaataggcgtatcacgaggccctttcgtc

SEQ ID NO: 88 - DNA, 4717 bp, Artificial Sequence
  pLMTB8389
tcgcgcgtttcggtgatgacggtgaaaacctctgacacatgcagctcccggagacggtcacagcttgtctgtaagcggatgccgggagcagacaagcccgtcagggcgcgtcagcgggtgttggcgggtgtcggggctggcttaactatgcggcatcagagcagattgtactgagagtgcaccatatgcggtgtgaaataccgcacagatgcgtaaggagaaaataccgcatcaggcgccattcgccattcaggctgcgcaactgttgggaagggcgatcggtgcgggcctcttcgctattacgccagctggcgaaagggggatgtgctgcaaggcgattaagttgggtaacgccagggttttcccagtcacgacgttgtaaaacgacggccagtgaattgacgcgtattgggatatttaaatggcgtgtgcgcaccggcgtgtgccaacgcccaggtactgtgcgcacgttcgtatctccatacgctagctgaccgagacgcatgccctccgccaccctcagtggcgcgcaccttctctcgtttgagctctttatgctctcgtgaatggcacacaacatcccgtgactatcacgatgatccttctcaagccacaccgcttgccttttctacagctctgcgttctctggcccatcctcctcttgtttgctttccctctttgcacatccgtgtgcgcgtccttgttcttctcttctgcgcacactattctgcgcccgcgacccgcgcttcgactgctgtcgggtcatgccttgtgctgcgcgttcagctcttcattgcccctcggccttgtacatagcggctctccgtcatcgacgttttcctctctcttcagctctatacactccctcccttgtcaacacactacactgtgtctccccctttcatctctcctcccctgtcacaatggtccgcaagaagggatctctgatcctgtgtggggcgtttctgttcgtggcctggaacgcgctcttgctcctttttttgtggggccgcccgcccattggtcgactcggcgagggtgggggggcggagccgggcgcgggcgaggagtggggtgcggggaagagcaaagtgggtggcgctaacggcctggcgggtgaggttatccgcctggcggaggaggtcgagagtgagctggagacgcagaagaagcttctgaaacagatacagtcgcaccgcgagctttgggaacagcgtaaggaactggagaagcgtgaaagcgaggataccaaggacgagaagattgacgttgagcctaagaagccccgccagatcccggccgtgcacctgtcccacaaggtggtggaagacgcccagacagtaaccaagaaaatgcaaacgctgatggtgacaccgcctcagctggtgatgaaggagcaggagacagatcagaagaataagcagatgatggaggaccagctggggctcaccacgccatctccgcaaatcatcatcccgattctcgtgatcgcgtgcgatcgcgtgaccgtgaagcggtccctcgaccgtctgatccagtaccggccaagcgcagagttgtacccaattatcgtcagccaggattgtggccacgctgacacagcccgcgtgatcgggtcctatggcagccagatcacgcacataagccagcctgaccttgcagatataccggtgcggccagatcatcgcaagtttcaggggtactacaagatcgcccgccattaccgttgggcgctcaaccaggtgttcaacgtgtttgcctactcaacggtggtgatagtcgaggacgacctggaggtggcgcctgacttcttcgagtactttcgagctctctatccgatcttgcgctcagatcctaccttgtggtgcatttcggcttggaacgataacgggcgtgatggtctcgtggatcccgggaaggccgagctcctctaccgcacggacttctttcctggactgggttggatgttgcttaaggaggtgtgggcggaactcgaacccaagtggccaaaggcgttctgggacgactggatgcgacacccggagcagcgtaaaaatcgctcttgcatccgaccggaaattagtcggacgatcacattcggtcgtaaaggtgtgtccttggggcagttcttcgaccagtatctccgttacattaagctcaacactgaattcgtccctttcacgaagcacgacctcagctatcttgtgcgagagaagtacgatgttagctttgaaaaagatgtatactcggctcccctcgtaaaggtagaggagctgcagcacggcggcagccttaagggcagcggccccttccgagtacagtactcgagccgagacagtttcaaggtccttgcccgcaacctcggggtgatggatgacctgaagtcaggcgtgccacgcgccggttaccgcggcgtggtctcgttcatatctcgcggccggcgcatctacctcgcgccccctgagggttggacgaaatacgacgtgagctggagctaaatttaaatatcccaatggcgcgccgagcttggctcgagcatggtcatagctgtttcctgtgtgaaattgttatccgctcacaattccacacaacatacgagccggaagcataaagtgtaaagcctggggtgcctaatgagtgagctaactcacattaattgcgttgcgctcactgcccgctttccagtcgggaaacctgtcgtgccagctgcattaatgaatcggccaacgcgcggggagaggcggtttgcgtattgggcgctcttccgcttcctcgctcactgactcgctgcgctcggtcgttcggctgcggcgagcggtatcagctcactcaaaggcggtaatacggttatccacagaatcaggggataacgcaggaaagaacatgtgagcaaaaggccagcaaaaggccaggaaccgtaaaaaggccgcgttgctggcgtttttccataggctccgcccccctgacgagcatcacaaaaatcgacgctcaagtcagaggtggcgaaacccgacaggactataaagataccaggcgtttccccctggaagctccctcgtgcgctctcctgttccgaccctgccgcttaccggatacctgtccgcctttctcccttcgggaagcgtggcgctttctcatagctcacgctgtaggtatctcagttcggtgtaggtcgttcgctccaagctgggctgtgtgcacgaaccccccgttcagcccgaccgctgcgccttatccggtaactatcgtcttgagtccaacccggtaagacacgacttatcgccactggcagcagccactggtaacaggattagcagagcgaggtatgtaggcggtgctacagagttcttgaagtggtggcctaactacggctacactagaagaacagtatttggtatctgcgctctgctgaagccagttaccttcggaaaaagagttggtagctcttgatccggcaaacaaaccaccgctggtagcggtggtttttttgtttgcaagcagcagattacgcgcagaaaaaaaggatctcaagaagatcctttgatcttttctacggggtctgacgctcagtggaacgaaaactcacgttaagggattttggtcatgagattatcaaaaaggatcttcacctagatccttttaaattaaaaatgaagttttaaatcaatctaaagtatatatgagtaaacttggtctgacagttagaaaaactcatcgagcatcaaatgaaactgcaatttattcatatcaggattatcaataccatatttttgaaaaagccgtttctgtaatgaaggagaaaactcaccgaggcagttccataggatggcaagatcctggtatcggtctgcgattccgactcgtccaacatcaatacaacctattaatttcccctcgtcaaaaataaggttatcaagtgagaaatcaccatgagtgacgactgaatccggtgagaatggcaaaagtttatgcatttctttccagacttgttcaacaggccagccattacgctcgtcatcaaaatcactcgcatcaaccaaaccgttattcattcgtgattgcgcctgagcgagacgaaatacgcgatcgctgttaaaaggacaattacaaacaggaatcgaatgcaaccggcgcaggaacactgccagcgcatcaacaatattttcacctgaatcaggatattcttctaatacctggaatgctgttttcccagggatcgcagtggtgagtaaccatgcatcatcaggagtacggataaaatgcttgatggtcggaagaggcataaattccgtcagccagtttagtctgaccatctcatctgtaacatcattggcaacgctacctttgccatgtttcagaaacaactctggcgcatcgggcttcccatacaatcgatagattgtcgcacctgattgcccgacattatcgcgagcccatttatacccatataaatcagcatccatgttggaatttaatcgcggcctagagcaagacgtttcccgttgaatatggctcatactcttcctttttcaatattattgaagcatttatcagggttattgtctcatgagcggatacatatttgaatgtatttagaaaaataaacaaataggggttccgcgcacatttccccgaaaagtgccacctgacgtctaagaaaccattattatcatgacattaacctataaaaataggcgtatcacgaggccctttcgtc

SEQ ID NO: 89 - DNA, 4379 bp, Artificial Sequence
  pLMTB8392
tcgcgcgtttcggtgatgacggtgaaaacctctgacacatgcagctcccggagacggtcacagcttgtctgtaagcggatgccgggagcagacaagcccgtcagggcgcgtcagcgggtgttggcgggtgtcggggctggcttaactatgcggcatcagagcagattgtactgagagtgcaccatatgcggtgtgaaataccgcacagatgcgtaaggagaaaataccgcatcaggcgccattcgccattcaggctgcgcaactgttgggaagggcgatcggtgcgggcctcttcgctattacgccagctggcgaaagggggatgtgctgcaaggcgattaagttgggtaacgccagggttttcccagtcacgacgttgtaaaacgacggccagtgaattgacgcgtattgggatatttaaatcgcaaggaatcggtcaatacactacatggcgtgatttcatatgcgcgattgctgatccccatgtgtatcactggcaaactgtgatggacgacaccgtcagtgcgtccgtcgcgcaggctctcgatgagctgatgctttgggccgaggactgccccgaagtccggcacctcgtgcacgcggatttcggctccaacaatgtcctgacggacaatggccgcataacagcggtcattgactggagcgaggcgatgttcggggattcccaatacgaggtcgccaacatcttcttctggaggccgtggttggcttgtatggagcagcagacgcgctacttcgagcggaggcatccggagcttgcaggatcgccgcggctccgggcgtatatgctccgcattggtcttgaccaactctatcagagcttggttgacggcaatttcgatgatgcagcttgggcgcagggtcgatgcgacgcaatcgtccgatccggagccgggactgtcgggcgtacacaaatcgcccgcagaagcgcggccgtctggaccgatggctgtgtagaagtactcgccgatagtggaaaccgacgccccagcactcgtccgagggcaaaggaatagctagcctcggagatccactagttctagttctaggggccgaattcagatcctcgtgtgagcgttcgcggaatcggtcgctcgtgtttatgcccgtcttggtgttgtgctcgcaaggcggtgcagcaggataccgtcgccctcctctctccttgcttctctgttcttcaattcgcgatctcacagaggccggctgtgcacgcccttcctcaccctccttttcccacctctcggccaccggtcggctccgttccgtctgccgtcgagaagggacgggcatgtgcagctcctccctttctctcgcgcgcgcatcttctcttgcttgtggcactcacgctcatgcgtcaaggcggccccacgccgagcccctgcgctcccttccctcttgcgcatccgtagcgcggatgccgtcgatgcgcaaggccggcatgaaggagcgcgtgccctcaagagggcacactatcatgccctacgtgggccacgcagcgatgaggccggcttcggcggagatgcgtcacgcacgtgccagatgatgcgctacgccttccttgacttgcgcccccctctcttcctccgtctctcactctctctctctcacacacacacacacacacacacacacacaaatgatgtcccctgaagatgcgaccgggctggaggctgcacgcaagcagaagatccataacctgaagctgaagacggcgtgcctagagaatgaggagcttgtgcaggagctgcacatctctgactggtcagagacgcagcgacagaagctgcgcggcgcccatgagaagggcgaggagctgcttgcgtccgtggaggttgggacgaagtggaacctgatggaggcgtacgacctggcgaagctgatgcgcgtgtgcgggctggagatgagtcagcgcgagctgtaccgcccggaggacaagccgcagttcatggacatcattggcgtgaagaaggtgctacaggaccttcgacagaaccggaacaagacgcgcgttgtgagcttcacgcagctgatcgacaacagcatcgcgaagatggagaaggtggaggaggagctgcggcggtcgcagctggacgcgacgcagctcgcgcaggtgccgtctcggacggtgaagatgatatttaaatatcccaatggcgcgccgagcttggctcgagcatggtcatagctgtttcctgtgtgaaattgttatccgctcacaattccacacaacatacgagccggaagcataaagtgtaaagcctggggtgcctaatgagtgagctaactcacattaattgcgttgcgctcactgcccgctttccagtcgggaaacctgtcgtgccagctgcattaatgaatcggccaacgcgcggggagaggcggtttgcgtattgggcgctcttccgcttcctcgctcactgactcgctgcgctcggtcgttcggctgcggcgagcggtatcagctcactcaaaggcggtaatacggttatccacagaatcaggggataacgcaggaaagaacatgtgagcaaaaggccagcaaaaggccaggaaccgtaaaaaggccgcgttgctggcgtttttccataggctccgcccccctgacgagcatcacaaaaatcgacgctcaagtcagaggtggcgaaacccgacaggactataaagataccaggcgtttccccctggaagctccctcgtgcgctctcctgttccgaccctgccgcttaccggatacctgtccgcctttctcccttcgggaagcgtggcgctttctcatagctcacgctgtaggtatctcagttcggtgtaggtcgttcgctccaagctgggctgtgtgcacgaaccccccgttcagcccgaccgctgcgccttatccggtaactatcgtcttgagtccaacccggtaagacacgacttatcgccactggcagcagccactggtaacaggattagcagagcgaggtatgtaggcggtgctacagagttcttgaagtggtggcctaactacggctacactagaagaacagtatttggtatctgcgctctgctgaagccagttaccttcggaaaaagagttggtagctcttgatccggcaaacaaaccaccgctggtagcggtggtttttttgtttgcaagcagcagattacgcgcagaaaaaaaggatctcaagaagatcctttgatcttttctacggggtctgacgctcagtggaacgaaaactcacgttaagggattttggtcatgagattatcaaaaaggatcttcacctagatccttttaaattaaaaatgaagttttaaatcaatctaaagtatatatgagtaaacttggtctgacagttagaaaaactcatcgagcatcaaatgaaactgcaatttattcatatcaggattatcaataccatatttttgaaaaagccgtttctgtaatgaaggagaaaactcaccgaggcagttccataggatggcaagatcctggtatcggtctgcgattccgactcgtccaacatcaatacaacctattaatttcccctcgtcaaaaataaggttatcaagtgagaaatcaccatgagtgacgactgaatccggtgagaatggcaaaagtttatgcatttctttccagacttgttcaacaggccagccattacgctcgtcatcaaaatcactcgcatcaaccaaaccgttattcattcgtgattgcgcctgagcgagacgaaatacgcgatcgctgttaaaaggacaattacaaacaggaatcgaatgcaaccggcgcaggaacactgccagcgcatcaacaatattttcacctgaatcaggatattcttctaatacctggaatgctgttttcccagggatcgcagtggtgagtaaccatgcatcatcaggagtacggataaaatgcttgatggtcggaagaggcataaattccgtcagccagtttagtctgaccatctcatctgtaacatcattggcaacgctacctttgccatgtttcagaaacaactctggcgcatcgggcttcccatacaatcgatagattgtcgcacctgattgcccgacattatcgcgagcccatttatacccatataaatcagcatccatgttggaatttaatcgcggcctagagcaagacgtttcccgttgaatatggctcatactcttcctttttcaatattattgaagcatttatcagggttattgtctcatgagcggatacatatttgaatgtatttagaaaaataaacaaataggggttccgcgcacatttccccgaaaagtgccacctgacgtctaagaaaccattattatcatgacattaacctataaaaataggcgtatcacgaggccctttcgtc

SEQ ID NO: 90 - DNA, 4381 bp, Artificial Sequence
  pLMTB8443
tcgcgcgtttcggtgatgacggtgaaaacctctgacacatgcagctcccggagacggtcacagcttgtctgtaagcggatgccgggagcagacaagcccgtcagggcgcgtcagcgggtgttggcgggtgtcggggctggcttaactatgcggcatcagagcagattgtactgagagtgcaccatatgcggtgtgaaataccgcacagatgcgtaaggagaaaataccgcatcaggcgccattcgccattcaggctgcgcaactgttgggaagggcgatcggtgcgggcctcttcgctattacgccagctggcgaaagggggatgtgctgcaaggcgattaagttgggtaacgccagggttttcccagtcacgacgttgtaaaacgacggccagtgaattgacgcgtattgggatatttaaatagtggtgcgcgtgcgtgtctccgctgtctggagctccttccctgccacgcaactgcgagccttcacggcggcccacccgcccgcacacgggagcggagactgtgcgtgtgtgcgtgtgtgcgtgtggagcgggtaatgtcggcacacacacacacacacacacacacacacatgcacgctgagagaatgagcagccccagaggagaacatggggctcatgcgcgcagacggaagggcacacacgaggaggggcacacccctctgtcttcagggagcacggccctgctgctgccatgtgacgggcgtctgccacgcgactcttccccacaccttgctcctttcctccctcccctcctggcgcacacgaaacacgcgcgatgcacacacgcacgcgcccaccccccaaaataaataaaatgaaacgcgcagctcttcgctctcgttcttcgaacaaacacatctaaacccccttccaacccctctttcttcttttttcaaccatgaagcgcatcctttgcatcacagggactcgagctgatttcggcaagctgaagccacttctggcgtacatcgagaatcaccccgatctggagctccacctgattgtgacagggatgcatatgatgaagacatatgggcgtacgtacaaggaggttacgcgcgagaactaccagcacacctacctgtttagtaaccagattcagggcgagccgatgggagcggtgttgggcaatacgattacctttattagccgcttgtcagacgagattgaaccagacatggtcatgatccatggcgaccgcctcgaagcgcttgcgggcgcagctgtgggcgccctgtcatcccgacttgtctgccacatcgagggcggagagctttcagggacagtagacgacagcatccgccactcgatctcgaagctgagtcacatccacctggtagcgaacgagcaggcggtgacccggctggtccagatgggcgagaagcgtaagcacattcatatcattggcagcccggaccttgacgtcatggcctcgtctacgctgccttccctcgaggaggtgaaggaatattacggcctgccgtacgagaattacggaatctcgatgttccatccagttaccacggaggctcaccttatgcctcagtacgctgctcagtactttaaggcgctcgaactgagcggtcaaaacatcatttccatataccctaacaacgacacaggtactgagagcatcttgcaggaacttctgaaataccagtcggataagtttattgcgttcccatcaattcggttcgagtactttctcgtactgctgaagcacgcaaagtttatggtggggaactccagcgctggtattcgagaggctccattgtacggcgtcccctctatcgacgtgggcacacgacaatcaaatcgccacatgggaaagtctataatccacacagactacgagacgaagaacatttttgacgccatccaacaggcctgctctctgggaaaattcgaggcagacgacacattcaatggtggcgacacccgcacctcaacggagcgctttgccgaggttatcaacaaccccgagacctggaacgtgagcgcacaaaagcgctttatcgacctgaacctgggcgggtccgggggcgagcagaagctcatctcggaagaagacctcgagcagaaactcattagtgaggaggacttggagcagaagctgatctcggaggaagatctctgaatttaaatatcccaatggcgcgccgagcttggctcgagcatggtcatagctgtttcctgtgtgaaattgttatccgctcacaattccacacaacatacgagccggaagcataaagtgtaaagcctggggtgcctaatgagtgagctaactcacattaattgcgttgcgctcactgcccgctttccagtcgggaaacctgtcgtgccagctgcattaatgaatcggccaacgcgcggggagaggcggtttgcgtattgggcgctcttccgcttcctcgctcactgactcgctgcgctcggtcgttcggctgcggcgagcggtatcagctcactcaaaggcggtaatacggttatccacagaatcaggggataacgcaggaaagaacatgtgagcaaaaggccagcaaaaggccaggaaccgtaaaaaggccgcgttgctggcgtttttccataggctccgcccccctgacgagcatcacaaaaatcgacgctcaagtcagaggtggcgaaacccgacaggactataaagataccaggcgtttccccctggaagctccctcgtgcgctctcctgttccgaccctgccgcttaccggatacctgtccgcctttctcccttcgggaagcgtggcgctttctcatagctcacgctgtaggtatctcagttcggtgtaggtcgttcgctccaagctgggctgtgtgcacgaaccccccgttcagcccgaccgctgcgccttatccggtaactatcgtcttgagtccaacccggtaagacacgacttatcgccactggcagcagccactggtaacaggattagcagagcgaggtatgtaggcggtgctacagagttcttgaagtggtggcctaactacggctacactagaagaacagtatttggtatctgcgctctgctgaagccagttaccttcggaaaaagagttggtagctcttgatccggcaaacaaaccaccgctggtagcggtggtttttttgtttgcaagcagcagattacgcgcagaaaaaaaggatctcaagaagatcctttgatcttttctacggggtctgacgctcagtggaacgaaaactcacgttaagggattttggtcatgagattatcaaaaaggatcttcacctagatccttttaaattaaaaatgaagttttaaatcaatctaaagtatatatgagtaaacttggtctgacagttagaaaaactcatcgagcatcaaatgaaactgcaatttattcatatcaggattatcaataccatatttttgaaaaagccgtttctgtaatgaaggagaaaactcaccgaggcagttccataggatggcaagatcctggtatcggtctgcgattccgactcgtccaacatcaatacaacctattaatttcccctcgtcaaaaataaggttatcaagtgagaaatcaccatgagtgacgactgaatccggtgagaatggcaaaagtttatgcatttctttccagacttgttcaacaggccagccattacgctcgtcatcaaaatcactcgcatcaaccaaaccgttattcattcgtgattgcgcctgagcgagacgaaatacgcgatcgctgttaaaaggacaattacaaacaggaatcgaatgcaaccggcgcaggaacactgccagcgcatcaacaatattttcacctgaatcaggatattcttctaatacctggaatgctgttttcccagggatcgcagtggtgagtaaccatgcatcatcaggagtacggataaaatgcttgatggtcggaagaggcataaattccgtcagccagtttagtctgaccatctcatctgtaacatcattggcaacgctacctttgccatgtttcagaaacaactctggcgcatcgggcttcccatacaatcgatagattgtcgcacctgattgcccgacattatcgcgagcccatttatacccatataaatcagcatccatgttggaatttaatcgcggcctagagcaagacgtttcccgttgaatatggctcatactcttcctttttcaatattattgaagcatttatcagggttattgtctcatgagcggatacatatttgaatgtatttagaaaaataaacaaataggggttccgcgcacatttccccgaaaagtgccacctgacgtctaagaaaccattattatcatgacattaacctataaaaataggcgtatcacgaggccctttcgtc

SEQ ID NO: 91 - DNA, 3662 bp, Artificial Sequence
  pLMTB8448
tcgcgcgtttcggtgatgacggtgaaaacctctgacacatgcagctcccggagacggtcacagcttgtctgtaagcggatgccgggagcagacaagcccgtcagggcgcgtcagcgggtgttggcgggtgtcggggctggcttaactatgcggcatcagagcagattgtactgagagtgcaccatatgcggtgtgaaataccgcacagatgcgtaaggagaaaataccgcatcaggcgccattcgccattcaggctgcgcaactgttgggaagggcgatcggtgcgggcctcttcgctattacgccagctggcgaaagggggatgtgctgcaaggcgattaagttgggtaacgccagggttttcccagtcacgacgttgtaaaacgacggccagtgaattgacgcgtattgggatatttaaatatggactacaaggaccacgacggcgactacaaggatcacgatatcgactacaaggatgacgatgacaagggtggtagcggaggtgctagcgccacatttacgggagtcatacctcctgtgatgacgccgcttcacgctgacggttctgtggacgtagagagcctccggaagctcgtcgaccatctgatcaacggcggtgtcgatggcctgttcgcactcggaagcagcggcgaggcagcatttctgacacgtgcgcagcgcaaactcgcgctgaccacgatcatcgagcacaccgcgggccgagtgccagttacggcgggggtgatagagaccacaactgcccgagtcattgaattggtcgaggacgcgctcgaggctggggccgagggcctggtggcgactgcgccattctacacccggactcacgatgtggagattgaggagcacttccgtaagatccacgctgcagcgccggagctcccgctcttcgcctacaacattccagtgtctgttcactcgaacttgaatcctgtgatgctcctcactcttgctaaagacggcgttttggccggaaccaaggattcgagtggcaatgatggcgcaatccgttcgctgatcgaggcgcgcgacgacgctggcctgaccgagcagttcaagattctcacgggcagcgagaccaccgtagactttgcctacctggctggggctgacggtgtcgttccgggcctcgggaacgtagatccggcggcttacgctgccctcgccaagctgtgtctcgacggcaagtgggccgaggccgctgctctccagaagcgcatcaaccacctgtttcacatcgtgttcgtgggagatacgtcgcacatgtcgggctcaagcgctggcctcggcggctttaaaactgccctcgcgcaccttggaatcatcgagtctaacgcgatggccgtgccgcaccagtcgctctctgacgaggagacggcgcgcatccacgccatagtggacgagtttttgtacacagcgtgaatttaaatatcccaatggcgcgccgagcttggctcgagcatggtcatagctgtttcctgtgtgaaattgttatccgctcacaattccacacaacatacgagccggaagcataaagtgtaaagcctggggtgcctaatgagtgagctaactcacattaattgcgttgcgctcactgcccgctttccagtcgggaaacctgtcgtgccagctgcattaatgaatcggccaacgcgcggggagaggcggtttgcgtattgggcgctcttccgcttcctcgctcactgactcgctgcgctcggtcgttcggctgcggcgagcggtatcagctcactcaaaggcggtaatacggttatccacagaatcaggggataacgcaggaaagaacatgtgagcaaaaggccagcaaaaggccaggaaccgtaaaaaggccgcgttgctggcgtttttccataggctccgcccccctgacgagcatcacaaaaatcgacgctcaagtcagaggtggcgaaacccgacaggactataaagataccaggcgtttccccctggaagctccctcgtgcgctctcctgttccgaccctgccgcttaccggatacctgtccgcctttctcccttcgggaagcgtggcgctttctcatagctcacgctgtaggtatctcagttcggtgtaggtcgttcgctccaagctgggctgtgtgcacgaaccccccgttcagcccgaccgctgcgccttatccggtaactatcgtcttgagtccaacccggtaagacacgacttatcgccactggcagcagccactggtaacaggattagcagagcgaggtatgtaggcggtgctacagagttcttgaagtggtggcctaactacggctacactagaagaacagtatttggtatctgcgctctgctgaagccagttaccttcggaaaaagagttggtagctcttgatccggcaaacaaaccaccgctggtagcggtggtttttttgtttgcaagcagcagattacgcgcagaaaaaaaggatctcaagaagatcctttgatcttttctacggggtctgacgctcagtggaacgaaaactcacgttaagggattttggtcatgagattatcaaaaaggatcttcacctagatccttttaaattaaaaatgaagttttaaatcaatctaaagtatatatgagtaaacttggtctgacagttagaaaaactcatcgagcatcaaatgaaactgcaatttattcatatcaggattatcaataccatatttttgaaaaagccgtttctgtaatgaaggagaaaactcaccgaggcagttccataggatggcaagatcctggtatcggtctgcgattccgactcgtccaacatcaatacaacctattaatttcccctcgtcaaaaataaggttatcaagtgagaaatcaccatgagtgacgactgaatccggtgagaatggcaaaagtttatgcatttctttccagacttgttcaacaggccagccattacgctcgtcatcaaaatcactcgcatcaaccaaaccgttattcattcgtgattgcgcctgagcgagacgaaatacgcgatcgctgttaaaaggacaattacaaacaggaatcgaatgcaaccggcgcaggaacactgccagcgcatcaacaatattttcacctgaatcaggatattcttctaatacctggaatgctgttttcccagggatcgcagtggtgagtaaccatgcatcatcaggagtacggataaaatgcttgatggtcggaagaggcataaattccgtcagccagtttagtctgaccatctcatctgtaacatcattggcaacgctacctttgccatgtttcagaaacaactctggcgcatcgggcttcccatacaatcgatagattgtcgcacctgattgcccgacattatcgcgagcccatttatacccatataaatcagcatccatgttggaatttaatcgcggcctagagcaagacgtttcccgttgaatatggctcatactcttcctttttcaatattattgaagcatttatcagggttattgtctcatgagcggatacatatttgaatgtatttagaaaaataaacaaataggggttccgcgcacatttccccgaaaagtgccacctgacgtctaagaaaccattattatcatgacattaacctataaaaataggcgtatcacgaggccctttcgtc

SEQ ID NO: 92 - DNA, 3425 bp, Artificial Sequence
  pLMTB8449
tcgcgcgtttcggtgatgacggtgaaaacctctgacacatgcagctcccggagacggtcacagcttgtctgtaagcggatgccgggagcagacaagcccgtcagggcgcgtcagcgggtgttggcgggtgtcggggctggcttaactatgcggcatcagagcagattgtactgagagtgcaccatatgcggtgtgaaataccgcacagatgcgtaaggagaaaataccgcatcaggcgccattcgccattcaggctgcgcaactgttgggaagggcgatcggtgcgggcctcttcgctattacgccagctggcgaaagggggatgtgctgcaaggcgattaagttgggtaacgccagggttttcccagtcacgacgttgtaaaacgacggccagtgaattgacgcgtattgggatatttaaatatggagaaacagaacatcgcggtcatcctcgcgcggcagaactccaaggggctgccactcaagaacctgcgtaagatgaacggaatcagtctcctcggccacacgatcaatgcggcgatctcgtctaagtgcttcgaccgcatcattgtgtctacggacggagggcttattgcggaggaggctaagaacttcggggttgaggttgtacttcggcccgcggagctggcgtctgacaccgcgtcctccatcagtggggttattcacgcactggagaccatcggatctaacagtggaactgttacacttctgcaacctacctcacccctgcggactggtgcacacattcgagaggcattcagcctctttgacgagaagatcaaaggaagcgttgtaagcgcgtgccccatggagcaccatccacttaagacattgctccagattaacaacggagagtacgccccgatgcgccacctgtcggatctggagcagccacgccagcagctgccccaagcattccgcccgaacggcgcgatctacatcaacgacaccgcgagcctgatcgcgaacaattgtttttttattgctcccacgaaactctacatcatgtcccatcaagattcgattgatatcgacacggagttggatctgcagcaggcggagaacatactgaatcacaaggagtccggagggagtggcggttacccgtacgacgtgcccgactacgcctacccgtacgatgtgccggattacgcgtatccatatgacgtgccagactatgcgtagatttaaatatcccaatggcgcgccgagcttggctcgagcatggtcatagctgtttcctgtgtgaaattgttatccgctcacaattccacacaacatacgagccggaagcataaagtgtaaagcctggggtgcctaatgagtgagctaactcacattaattgcgttgcgctcactgcccgctttccagtcgggaaacctgtcgtgccagctgcattaatgaatcggccaacgcgcggggagaggcggtttgcgtattgggcgctcttccgcttcctcgctcactgactcgctgcgctcggtcgttcggctgcggcgagcggtatcagctcactcaaaggcggtaatacggttatccacagaatcaggggataacgcaggaaagaacatgtgagcaaaaggccagcaaaaggccaggaaccgtaaaaaggccgcgttgctggcgtttttccataggctccgcccccctgacgagcatcacaaaaatcgacgctcaagtcagaggtggcgaaacccgacaggactataaagataccaggcgtttccccctggaagctccctcgtgcgctctcctgttccgaccctgccgcttaccggatacctgtccgcctttctcccttcgggaagcgtggcgctttctcatagctcacgctgtaggtatctcagttcggtgtaggtcgttcgctccaagctgggctgtgtgcacgaaccccccgttcagcccgaccgctgcgccttatccggtaactatcgtcttgagtccaacccggtaagacacgacttatcgccactggcagcagccactggtaacaggattagcagagcgaggtatgtaggcggtgctacagagttcttgaagtggtggcctaactacggctacactagaagaacagtatttggtatctgcgctctgctgaagccagttaccttcggaaaaagagttggtagctcttgatccggcaaacaaaccaccgctggtagcggtggtttttttgtttgcaagcagcagattacgcgcagaaaaaaaggatctcaagaagatcctttgatcttttctacggggtctgacgctcagtggaacgaaaactcacgttaagggattttggtcatgagattatcaaaaaggatcttcacctagatccttttaaattaaaaatgaagttttaaatcaatctaaagtatatatgagtaaacttggtctgacagttagaaaaactcatcgagcatcaaatgaaactgcaatttattcatatcaggattatcaataccatatttttgaaaaagccgtttctgtaatgaaggagaaaactcaccgaggcagttccataggatggcaagatcctggtatcggtctgcgattccgactcgtccaacatcaatacaacctattaatttcccctcgtcaaaaataaggttatcaagtgagaaatcaccatgagtgacgactgaatccggtgagaatggcaaaagtttatgcatttctttccagacttgttcaacaggccagccattacgctcgtcatcaaaatcactcgcatcaaccaaaccgttattcattcgtgattgcgcctgagcgagacgaaatacgcgatcgctgttaaaaggacaattacaaacaggaatcgaatgcaaccggcgcaggaacactgccagcgcatcaacaatattttcacctgaatcaggatattcttctaatacctggaatgctgttttcccagggatcgcagtggtgagtaaccatgcatcatcaggagtacggataaaatgcttgatggtcggaagaggcataaattccgtcagccagtttagtctgaccatctcatctgtaacatcattggcaacgctacctttgccatgtttcagaaacaactctggcgcatcgggcttcccatacaatcgatagattgtcgcacctgattgcccgacattatcgcgagcccatttatacccatataaatcagcatccatgttggaatttaatcgcggcctagagcaagacgtttcccgttgaatatggctcatactcttcctttttcaatattattgaagcatttatcagggttattgtctcatgagcggatacatatttgaatgtatttagaaaaataaacaaataggggttccgcgcacatttccccgaaaagtgccacctgacgtctaagaaaccattattatcatgacattaacctataaaaataggcgtatcacgaggccctttcgtc

SEQ ID NO: 93 - DNA, 3944 bp, Artificial Sequence
  pLMTB8505
tcgcgcgtttcggtgatgacggtgaaaacctctgacacatgcagctcccggagacggtcacagcttgtctgtaagcggatgccgggagcagacaagcccgtcagggcgcgtcagcgggtgttggcgggtgtcggggctggcttaactatgcggcatcagagcagattgtactgagagtgcaccatatgcggtgtgaaataccgcacagatgcgtaaggagaaaataccgcatcaggcgccattcgccattcaggctgcgcaactgttgggaagggcgatcggtgcgggcctcttcgctattacgccagctggcgaaagggggatgtgctgcaaggcgattaagttgggtaacgccagggttttcccagtcacgacgttgtaaaacgacggccagtgaattgacgcgtattgggatatttaaatatgatccacactaaccttaagcgaaagttcagttgcttcgtgttggtgttccttctctttgcaattatctgtgtgtggaagaagggctccgactacgaggcgctgacacttcaggccaaggtgttccagatgcctaagtcgcaggaaaaggtggccgtgggcccggccccgcaggcagtgttctcgaactcgaagcaggacccgaaggaaggcgtgcaaatactgtcgtatccgcgtgtgacggcgaaagtgaaaccacagcctagcctccaggtgtgggacaaggattcgacctacagcaagctcaacccacggcttctgaaaatatggcgcaactacctgaacatgaacaagtacaaagttagctacaagggtcccggacccggcgtaaagttctctgttgaggctttgcggtgccatctccgagaccatgtgaacgtgtcaatgatcgaagctacggacttcccttttaacactactgagtgggaggggtacctgcccaaggaaaacttccgcacgaaagccggcccctggcataagtgcgccgttgtcagctcggctggttccctcaagaatagccagcttggccgtgaaattgacaaccatgacgcagtgctccggttcaatggtgcacctacggataactttcaacaggacgtgggcaccaagacaacaatccgcctggtcaattcgcagctggttactacagagaagcgcttcctcaaggactctctttacaccgaagggattttgattttgtgggatccgagcgtgtaccacgcagacatcccccagtggtaccagaagcccgactataacttcttcgagacatacaagtcgtaccgtcgccttcacccatcccagccgttctacatcctgaaaccccaaatgccttgggaactgtgggacatcattcaggagatcagccccgaccttatccagccaaatccgccctcctcagggatgcttggcatcatcattatgatgacgctttgcgatcaggtagacatctacgagttcttgccttccaaacgcaaaaccgacgtgtgctattaccaccagaagttcttcgacagtgcgtgcacgatgggcgcataccacccccttcttttcgagaagaatatggtcaagcacctcaacgagggtacggatgaggacatttacctgtttgggaaggcaacactctccggatttcgtaacaaccgttgcgcaggagcatacccctacgacgtgccagattacgcctacccttacgatgtaccggactacgcttacccgtacgacgtgccggactacgcgtagatttaaatatcccaatggcgcgccgagcttggctcgagcatggtcatagctgtttcctgtgtgaaattgttatccgctcacaattccacacaacatacgagccggaagcataaagtgtaaagcctggggtgcctaatgagtgagctaactcacattaattgcgttgcgctcactgcccgctttccagtcgggaaacctgtcgtgccagctgcattaatgaatcggccaacgcgcggggagaggcggtttgcgtattgggcgctcttccgcttcctcgctcactgactcgctgcgctcggtcgttcggctgcggcgagcggtatcagctcactcaaaggcggtaatacggttatccacagaatcaggggataacgcaggaaagaacatgtgagcaaaaggccagcaaaaggccaggaaccgtaaaaaggccgcgttgctggcgtttttccataggctccgcccccctgacgagcatcacaaaaatcgacgctcaagtcagaggtggcgaaacccgacaggactataaagataccaggcgtttccccctggaagctccctcgtgcgctctcctgttccgaccctgccgcttaccggatacctgtccgcctttctcccttcgggaagcgtggcgctttctcatagctcacgctgtaggtatctcagttcggtgtaggtcgttcgctccaagctgggctgtgtgcacgaaccccccgttcagcccgaccgctgcgccttatccggtaactatcgtcttgagtccaacccggtaagacacgacttatcgccactggcagcagccactggtaacaggattagcagagcgaggtatgtaggcggtgctacagagttcttgaagtggtggcctaactacggctacactagaagaacagtatttggtatctgcgctctgctgaagccagttaccttcggaaaaagagttggtagctcttgatccggcaaacaaaccaccgctggtagcggtggtttttttgtttgcaagcagcagattacgcgcagaaaaaaaggatctcaagaagatcctttgatcttttctacggggtctgacgctcagtggaacgaaaactcacgttaagggattttggtcatgagattatcaaaaaggatcttcacctagatccttttaaattaaaaatgaagttttaaatcaatctaaagtatatatgagtaaacttggtctgacagttagaaaaactcatcgagcatcaaatgaaactgcaatttattcatatcaggattatcaataccatatttttgaaaaagccgtttctgtaatgaaggagaaaactcaccgaggcagttccataggatggcaagatcctggtatcggtctgcgattccgactcgtccaacatcaatacaacctattaatttcccctcgtcaaaaataaggttatcaagtgagaaatcaccatgagtgacgactgaatccggtgagaatggcaaaagtttatgcatttctttccagacttgttcaacaggccagccattacgctcgtcatcaaaatcactcgcatcaaccaaaccgttattcattcgtgattgcgcctgagcgagacgaaatacgcgatcgctgttaaaaggacaattacaaacaggaatcgaatgcaaccggcgcaggaacactgccagcgcatcaacaatattttcacctgaatcaggatattcttctaatacctggaatgctgttttcccagggatcgcagtggtgagtaaccatgcatcatcaggagtacggataaaatgcttgatggtcggaagaggcataaattccgtcagccagtttagtctgaccatctcatctgtaacatcattggcaacgctacctttgccatgtttcagaaacaactctggcgcatcgggcttcccatacaatcgatagattgtcgcacctgattgcccgacattatcgcgagcccatttatacccatataaatcagcatccatgttggaatttaatcgcggcctagagcaagacgtttcccgttgaatatggctcatactcttcctttttcaatattattgaagcatttatcagggttattgtctcatgagcggatacatatttgaatgtatttagaaaaataaacaaataggggttccgcgcacatttccccgaaaagtgccacctgacgtctaagaaaccattattatcatgacattaacctataaaaataggcgtatcacgaggccctttcgtc

SEQ ID NO: 94 - DNA, 3771 bp, Artificial Sequence
  pLMTB8507
tcgcgcgtttcggtgatgacggtgaaaacctctgacacatgcagctcccggagacggtcacagcttgtctgtaagcggatgccgggagcagacaagcccgtcagggcgcgtcagcgggtgttggcgggtgtcggggctggcttaactatgcggcatcagagcagattgtactgagagtgcaccatatgcggtgtgaaataccgcacagatgcgtaaggagaaaataccgcatcaggcgccattcgccattcaggctgcgcaactgttgggaagggcgatcggtgcgggcctcttcgctattacgccagctggcgaaagggggatgtgctgcaaggcgattaagttgggtaacgccagggttttcccagtcacgacgttgtaaaacgacggccagtgaattgacgcgtattgggatatttaaatggaacggtgatttctccgtgaacgaatacgagactctgtttggcaaagtcgccgcatgtaacattcgtaaaggcgcgcagatcaagaaaactgatatcgagggtggttcgggcggttatccttacgacgtcccggattacgcgtacccttacgacgtcccggactacgcatacccttacgacgtccctgattacgcctaagacgtgcacgcagtcctgtccccacccccgacagcaggagtgcgggactgggtgctctaacaagcgcatggtacgagctatgtgctggtgtgtagccagcggggctgtcatgccatgtcgatctctccccgtgagcagccccccaaaaagacaacctgatttctccctttttccgatatttctccctttgtgctaaggggacccttcagcagctcccagcgccgcacatgcacacactggcgcgtgcttccgaggtcctcggtgcacatattttctattatctcacacacccggttgcagggcggctcaatgtcacggcgcgcgcacgcactgccttgagtacggaacggcgagcgatacgaccgagacggcgctgccagtagggtgtaggacgctgcgcatctcatgaatgtatgaagcatgcagccaaccacacaaacatatgggcgcacgagtcttccctcacagacagcgcggctggtgaggcggcagaaggtcggccgcggaagggcacacactacgtttcacgcgtacatgaccccgtccgctttccgcgctattttaggcgcacacccgttcaccagcctctccgatcctgcttccactcctcctccgcctccgccctccctctccccgtcatgacgccgcacgcaccgcgatcgcacacaagctctctctctctctcaacacaaccgaaccaacatccctcaccccctctcttaccacaaaatgatccacactaaccttaagcgaaagttcagttgcttcgtgttggtgttccttctctttgcaattatctgtgtgtggaagaagggctccgactacgaggcgctgacacttcaggccaaggtgttccagatgcctaagtcgcaggaaaaggtggccgtgggcccggccccgcaggcagtgttctcgaactcgaagcaggaatttaaatatcccaatggcgcgccgagcttggctcgagcatggtcatagctgtttcctgtgtgaaattgttatccgctcacaattccacacaacatacgagccggaagcataaagtgtaaagcctggggtgcctaatgagtgagctaactcacattaattgcgttgcgctcactgcccgctttccagtcgggaaacctgtcgtgccagctgcattaatgaatcggccaacgcgcggggagaggcggtttgcgtattgggcgctcttccgcttcctcgctcactgactcgctgcgctcggtcgttcggctgcggcgagcggtatcagctcactcaaaggcggtaatacggttatccacagaatcaggggataacgcaggaaagaacatgtgagcaaaaggccagcaaaaggccaggaaccgtaaaaaggccgcgttgctggcgtttttccataggctccgcccccctgacgagcatcacaaaaatcgacgctcaagtcagaggtggcgaaacccgacaggactataaagataccaggcgtttccccctggaagctccctcgtgcgctctcctgttccgaccctgccgcttaccggatacctgtccgcctttctcccttcgggaagcgtggcgctttctcatagctcacgctgtaggtatctcagttcggtgtaggtcgttcgctccaagctgggctgtgtgcacgaaccccccgttcagcccgaccgctgcgccttatccggtaactatcgtcttgagtccaacccggtaagacacgacttatcgccactggcagcagccactggtaacaggattagcagagcgaggtatgtaggcggtgctacagagttcttgaagtggtggcctaactacggctacactagaagaacagtatttggtatctgcgctctgctgaagccagttaccttcggaaaaagagttggtagctcttgatccggcaaacaaaccaccgctggtagcggtggtttttttgtttgcaagcagcagattacgcgcagaaaaaaaggatctcaagaagatcctttgatcttttctacggggtctgacgctcagtggaacgaaaactcacgttaagggattttggtcatgagattatcaaaaaggatcttcacctagatccttttaaattaaaaatgaagttttaaatcaatctaaagtatatatgagtaaacttggtctgacagttagaaaaactcatcgagcatcaaatgaaactgcaatttattcatatcaggattatcaataccatatttttgaaaaagccgtttctgtaatgaaggagaaaactcaccgaggcagttccataggatggcaagatcctggtatcggtctgcgattccgactcgtccaacatcaatacaacctattaatttcccctcgtcaaaaataaggttatcaagtgagaaatcaccatgagtgacgactgaatccggtgagaatggcaaaagtttatgcatttctttccagacttgttcaacaggccagccattacgctcgtcatcaaaatcactcgcatcaaccaaaccgttattcattcgtgattgcgcctgagcgagacgaaatacgcgatcgctgttaaaaggacaattacaaacaggaatcgaatgcaaccggcgcaggaacactgccagcgcatcaacaatattttcacctgaatcaggatattcttctaatacctggaatgctgttttcccagggatcgcagtggtgagtaaccatgcatcatcaggagtacggataaaatgcttgatggtcggaagaggcataaattccgtcagccagtttagtctgaccatctcatctgtaacatcattggcaacgctacctttgccatgtttcagaaacaactctggcgcatcgggcttcccatacaatcgatagattgtcgcacctgattgcccgacattatcgcgagcccatttatacccatataaatcagcatccatgttggaatttaatcgcggcctagagcaagacgtttcccgttgaatatggctcatactcttcctttttcaatattattgaagcatttatcagggttattgtctcatgagcggatacatatttgaatgtatttagaaaaataaacaaataggggttccgcgcacatttccccgaaaagtgccacctgacgtctaagaaaccattattatcatgacattaacctataaaaataggcgtatcacgaggccctttcgtc

SEQ ID NO: 95 - DNA, 3830 bp, Artificial Sequence
  pLMTB8509
tcgcgcgtttcggtgatgacggtgaaaacctctgacacatgcagctcccggagacggtcacagcttgtctgtaagcggatgccgggagcagacaagcccgtcagggcgcgtcagcgggtgttggcgggtgtcggggctggcttaactatgcggcatcagagcagattgtactgagagtgcaccatatgcggtgtgaaataccgcacagatgcgtaaggagaaaataccgcatcaggcgccattcgccattcaggctgcgcaactgttgggaagggcgatcggtgcgggcctcttcgctattacgccagctggcgaaagggggatgtgctgcaaggcgattaagttgggtaacgccagggttttcccagtcacgacgttgtaaaacgacggccagtgaattgacgcgtattgggatagctcggcgcgccattgggatatttaaatttaggcgtaatcagggacgtcgtaagggtatgcgtagtccgggacgtcgtaagggtacgcgtaatccgggacgtcgtaaggataaccgcccgaaccaccctcgatatcagttttcttgatctgcgcgcctttacgaatgttacatgcggcgactttgccaaacagagtctcgtattcgttcacggagaaatcaccgttcccgggtcgcttaacccacagattatctccgctcaacagctcacccttcttgatatccttgtcggcgaccacggaggcaaacgcgaaatctttggtcggcttctcgcccgcaataatggtgtctttcttgccacctcgcgcgagtttcaatgcgtgcgcaccctgcttcagctccttgaatgtatccggattcatgctgcacacgatgtctgggcctggccggtccatgcggtccgtgaagtggcgctcgaggattgacccgccaagagccactgcgccgagacaagcgtagttatccagcgtgtggtcgctcaggccaataattgcatccgggaaggcttcactaaggtcgttcatgccgcccagtcggacgtcttcgtacggagtcgggtagatatttgtgcagtgcaacaacgcgtaaggcacaccggcctcacggatgatttcgacagacttcttgattgattcgatactattcatgccggtggacaagatgatcggtttaccaaacgatgcaaccaacttaatgagtggataattattgcactcgccggagcctatcttataggcgggaatatccatgcgctgcaatcggagagctgcggcgcgcgaaaacggggtagaaatgaaaatcatgcctttcgattccacatactccttcagcttgatctcatcttcctcgttcagggcgcagcgctccatgatctcgtaaatcgacacgtcagcattacctgggatcacttgcttggcttcgtcgctcatttcgtcctcaacaatgtgggtttggtgtttcaccacctctgccccagcgttataggcggcatccaccatctcaaaagccgtcttcaggctgccttcgtgattgatgccaatctcgcagataatcagcggctcatggttgtagcctacagagcggttgccgatcttaaattcgttgttattctgcatatttaaatatcccaatacgcgtcaattcaatcccaatggcgcgccgagcttggctcgagcatggtcatagctgtttcctgtgtgaaattgttatccgctcacaattccacacaacatacgagccggaagcataaagtgtaaagcctggggtgcctaatgagtgagctaactcacattaattgcgttgcgctcactgcccgctttccagtcgggaaacctgtcgtgccagctgcattaatgaatcggccaacgcgcggggagaggcggtttgcgtattgggcgctcttccgcttcctcgctcactgactcgctgcgctcggtcgttcggctgcggcgagcggtatcagctcactcaaaggcggtaatacggttatccacagaatcaggggataacgcaggaaagaacatgtgagcaaaaggccagcaaaaggccaggaaccgtaaaaaggccgcgttgctggcgtttttccataggctccgcccccctgacgagcatcacaaaaatcgacgctcaagtcagaggtggcgaaacccgacaggactataaagataccaggcgtttccccctggaagctccctcgtgcgctctcctgttccgaccctgccgcttaccggatacctgtccgcctttctcccttcgggaagcgtggcgctttctcatagctcacgctgtaggtatctcagttcggtgtaggtcgttcgctccaagctgggctgtgtgcacgaaccccccgttcagcccgaccgctgcgccttatccggtaactatcgtcttgagtccaacccggtaagacacgacttatcgccactggcagcagccactggtaacaggattagcagagcgaggtatgtaggcggtgctacagagttcttgaagtggtggcctaactacggctacactagaagaacagtatttggtatctgcgctctgctgaagccagttaccttcggaaaaagagttggtagctcttgatccggcaaacaaaccaccgctggtagcggtggtttttttgtttgcaagcagcagattacgcgcagaaaaaaaggatctcaagaagatcctttgatcttttctacggggtctgacgctcagtggaacgaaaactcacgttaagggattttggtcatgagattatcaaaaaggatcttcacctagatccttttaaattaaaaatgaagttttaaatcaatctaaagtatatatgagtaaacttggtctgacagttagaaaaactcatcgagcatcaaatgaaactgcaatttattcatatcaggattatcaataccatatttttgaaaaagccgtttctgtaatgaaggagaaaactcaccgaggcagttccataggatggcaagatcctggtatcggtctgcgattccgactcgtccaacatcaatacaacctattaatttcccctcgtcaaaaataaggttatcaagtgagaaatcaccatgagtgacgactgaatccggtgagaatggcaaaagtttatgcatttctttccagacttgttcaacaggccagccattacgctcgtcatcaaaatcactcgcatcaaccaaaccgttattcattcgtgattgcgcctgagcgagacgaaatacgcgatcgctgttaaaaggacaattacaaacaggaatcgaatgcaaccggcgcaggaacactgccagcgcatcaacaatattttcacctgaatcaggatattcttctaatacctggaatgctgttttcccagggatcgcagtggtgagtaaccatgcatcatcaggagtacggataaaatgcttgatggtcggaagaggcataaattccgtcagccagtttagtctgaccatctcatctgtaacatcattggcaacgctacctttgccatgtttcagaaacaactctggcgcatcgggcttcccatacaatcgatagattgtcgcacctgattgcccgacattatcgcgagcccatttatacccatataaatcagcatccatgttggaatttaatcgcggcctagagcaagacgtttcccgttgaatatggctcatactcttcctttttcaatattattgaagcatttatcagggttattgtctcatgagcggatacatatttgaatgtatttagaaaaataaacaaataggggttccgcgcacatttccccgaaaagtgccacctgacgtctaagaaaccattattatcatgacattaacctataaaaataggcgtatcacgaggccctttcgtc

SEQ ID NO: 96 - DNA, 3982 bp, Artificial Sequence
  pLMTB8517
tcgcgcgtttcggtgatgacggtgaaaacctctgacacatgcagctcccggagacggtcacagcttgtctgtaagcggatgccgggagcagacaagcccgtcagggcgcgtcagcgggtgttggcgggtgtcggggctggcttaactatgcggcatcagagcagattgtactgagagtgcaccatatgcggtgtgaaataccgcacagatgcgtaaggagaaaataccgcatcaggcgccattcgccattcaggctgcgcaactgttgggaagggcgatcggtgcgggcctcttcgctattacgccagctggcgaaagggggatgtgctgcaaggcgattaagttgggtaacgccagggttttcccagtcacgacgttgtaaaacgacggccagtgaattgacgcgtattgggattgaattgacgcgtattgggatatttaaatatggctgcccctcgcgataacgtcacactcctgtttaagctttattgcctggccgtgatgacacttatggctgcagtctacaccattgccctccgctacacgcgcactagcgacaaagaattgtattttagtacaacggccgtgtgcatcacagaggtgatcaagctcctgttgtccgtcggcatcctcgctaaagagacgggcagcctgggtcgatttaaagcgtcactgcgggagaacgtgcttggctctccgaaggagctcctgaagctgagtgtgccaagtctggtctatgcagtacaaaacaacatggcgtttctcgcgttgtcaaatcttgacgcggcggtgtaccaagtgacgtaccagctcaagattccatgcacggccttgtgcacggtgctgatgcttaaccgcacgctttctaagctgcagtgggtctctgtgtttatgctgtgcgcgggcgtgaccctcgtgcaatggaagcccgctcaggccaccaaggttgtggtggaacagaaccctcttcttggcttcggtgcgatcgcaattgcggtcctgtgctccggtttcgccggtgtgtactttgagaaggtgctcaagtcgtcggacacaagtctctgggtacgtaacatccagatgtacttgagcgggatcattgtgacactggccggagtctatctgtcggatggcgcggagattaaggagaagggcttcttctacgggtacacctactatgtgtggttcgtgatttttctcgcgtctgtcgggggcctctatacgtccgtcgtagttaagtatacggacaacattatgaagggtttctctgctgcggccgcgatagtcctgtcaacaattgccagcgtgatgttgttcggcctccagatcacgctgacctttgcgctcggtacattgcttgtttgcgtctcgatctacttgtacggccttcctcgccaagacacgacgtcgattcaacagggagaaactgcgtcgaaggagcgagttatcggtgtgggaggaagcggcggagaacagaaactgattagcgaagaggacttggagcaaaaactgataagcgaggaggacttggaacagaaactgatttccgaagaggatctgtaatcagcgctccgtagctcgctgcacatgcggtactgcgttccagagcatcacgcgacgcacagcaacacaaactttctttatctttctcttccattcgaaaaaaaaaaagataacacccacctcacataacgtccataacaagagagcgtgagaggagagtctgctcttcgacttcacaccgcgaatgcggcaacacgtggatttaaatatcccaatggcgcgccgagcttggctcgagcatggtcatagctgtttcctgtgtgaaattgttatccgctcacaattccacacaacatacgagccggaagcataaagtgtaaagcctggggtgcctaatgagtgagctaactcacattaattgcgttgcgctcactgcccgctttccagtcgggaaacctgtcgtgccagctgcattaatgaatcggccaacgcgcggggagaggcggtttgcgtattgggcgctcttccgcttcctcgctcactgactcgctgcgctcggtcgttcggctgcggcgagcggtatcagctcactcaaaggcggtaatacggttatccacagaatcaggggataacgcaggaaagaacatgtgagcaaaaggccagcaaaaggccaggaaccgtaaaaaggccgcgttgctggcgtttttccataggctccgcccccctgacgagcatcacaaaaatcgacgctcaagtcagaggtggcgaaacccgacaggactataaagataccaggcgtttccccctggaagctccctcgtgcgctctcctgttccgaccctgccgcttaccggatacctgtccgcctttctcccttcgggaagcgtggcgctttctcatagctcacgctgtaggtatctcagttcggtgtaggtcgttcgctccaagctgggctgtgtgcacgaaccccccgttcagcccgaccgctgcgccttatccggtaactatcgtcttgagtccaacccggtaagacacgacttatcgccactggcagcagccactggtaacaggattagcagagcgaggtatgtaggcggtgctacagagttcttgaagtggtggcctaactacggctacactagaagaacagtatttggtatctgcgctctgctgaagccagttaccttcggaaaaagagttggtagctcttgatccggcaaacaaaccaccgctggtagcggtggtttttttgtttgcaagcagcagattacgcgcagaaaaaaaggatctcaagaagatcctttgatcttttctacggggtctgacgctcagtggaacgaaaactcacgttaagggattttggtcatgagattatcaaaaaggatcttcacctagatccttttaaattaaaaatgaagttttaaatcaatctaaagtatatatgagtaaacttggtctgacagttagaaaaactcatcgagcatcaaatgaaactgcaatttattcatatcaggattatcaataccatatttttgaaaaagccgtttctgtaatgaaggagaaaactcaccgaggcagttccataggatggcaagatcctggtatcggtctgcgattccgactcgtccaacatcaatacaacctattaatttcccctcgtcaaaaataaggttatcaagtgagaaatcaccatgagtgacgactgaatccggtgagaatggcaaaagtttatgcatttctttccagacttgttcaacaggccagccattacgctcgtcatcaaaatcactcgcatcaaccaaaccgttattcattcgtgattgcgcctgagcgagacgaaatacgcgatcgctgttaaaaggacaattacaaacaggaatcgaatgcaaccggcgcaggaacactgccagcgcatcaacaatattttcacctgaatcaggatattcttctaatacctggaatgctgttttcccagggatcgcagtggtgagtaaccatgcatcatcaggagtacggataaaatgcttgatggtcggaagaggcataaattccgtcagccagtttagtctgaccatctcatctgtaacatcattggcaacgctacctttgccatgtttcagaaacaactctggcgcatcgggcttcccatacaatcgatagattgtcgcacctgattgcccgacattatcgcgagcccatttatacccatataaatcagcatccatgttggaatttaatcgcggcctagagcaagacgtttcccgttgaatatggctcatactcttcctttttcaatattattgaagcatttatcagggttattgtctcatgagcggatacatatttgaatgtatttagaaaaataaacaaataggggttccgcgcacatttccccgaaaagtgccacctgacgtctaagaaaccattattatcatgacattaacctataaaaataggcgtatcacgaggccctttcgtc

SEQ ID NO: 97 - DNA, 3640 bp, Artificial Sequence
  pLMTB8520
tcgcgcgtttcggtgatgacggtgaaaacctctgacacatgcagctcccggagacggtcacagcttgtctgtaagcggatgccgggagcagacaagcccgtcagggcgcgtcagcgggtgttggcgggtgtcggggctggcttaactatgcggcatcagagcagattgtactgagagtgcaccatatgcggtgtgaaataccgcacagatgcgtaaggagaaaataccgcatcaggcgccattcgccattcaggctgcgcaactgttgggaagggcgatcggtgcgggcctcttcgctattacgccagctggcgaaagggggatgtgctgcaaggcgattaagttgggtaacgccagggttttcccagtcacgacgttgtaaaacgacggccagtgaattgacgcgtattgggatatttaaattcagcgctccgtagctcgctgcacatgcggtactgcgttccagagcatcacgcgacgcacagcaacacaaactttctttatctttctcttccattcgaaaaaaaaaaagataacacccacctcacataacgtccataacaagagagcgtgagaggagagtctgctcttcgacttcacaccgcgaatgcggcaacacgtggcttatgcgcaacgcttcttttggcacgtcatgctaaacagaatctctgcgtagggcaaccaggctttcatcgacccgtcgttcgatcctcgctcctccggcattcttgagtcacgacacgaatgcttggctccgtgcgtctgcgagcgtttgtgcgttcctctaaagcaagaacgcggggacacgacgtttatctccgcctcgcgacgcactttctttaccaactacgtgcacttacaaccccccgatctcaaaacctctgctcatcgcatcacttctcattccgtcgttgtgcctctctctaccttcatctcccgcttgtgcttggtttcctaataccgttctcgtgtaatgcctcatcccttttccactacagctctttttttcccctcgccgaagatgaccgagtacaagccgaccgtgcgcctggcgacacgcgacgacgtgccacgcgcagtgcgcacactggcggcagcgtttgcggactacccggcgacacgccacacagtggacccggaccgccacatcgagcgcgtgacagagctgcaggagctgttcctgacgcgcgtgggcctggacatcggcaaggtctgggtggcagacgacggcgcagcggtggcagtgtggacgacaccagagagcgtcgaggcaggcgcggtgttcgcagagattggcccacgcatggcggagctgagcggcagccgcctggcagcacagcagcagatggagggcctgctggcaccgcaccgcccaaaggagccagcctggtttctggcgacagtgggcgtgtccccggaccatttaaatatcccaatggcgcgccgagcttggctcgagcatggtcatagctgtttcctgtgtgaaattgttatccgctcacaattccacacaacatacgagccggaagcataaagtgtaaagcctggggtgcctaatgagtgagctaactcacattaattgcgttgcgctcactgcccgctttccagtcgggaaacctgtcgtgccagctgcattaatgaatcggccaacgcgcggggagaggcggtttgcgtattgggcgctcttccgcttcctcgctcactgactcgctgcgctcggtcgttcggctgcggcgagcggtatcagctcactcaaaggcggtaatacggttatccacagaatcaggggataacgcaggaaagaacatgtgagcaaaaggccagcaaaaggccaggaaccgtaaaaaggccgcgttgctggcgtttttccataggctccgcccccctgacgagcatcacaaaaatcgacgctcaagtcagaggtggcgaaacccgacaggactataaagataccaggcgtttccccctggaagctccctcgtgcgctctcctgttccgaccctgccgcttaccggatacctgtccgcctttctcccttcgggaagcgtggcgctttctcatagctcacgctgtaggtatctcagttcggtgtaggtcgttcgctccaagctgggctgtgtgcacgaaccccccgttcagcccgaccgctgcgccttatccggtaactatcgtcttgagtccaacccggtaagacacgacttatcgccactggcagcagccactggtaacaggattagcagagcgaggtatgtaggcggtgctacagagttcttgaagtggtggcctaactacggctacactagaagaacagtatttggtatctgcgctctgctgaagccagttaccttcggaaaaagagttggtagctcttgatccggcaaacaaaccaccgctggtagcggtggtttttttgtttgcaagcagcagattacgcgcagaaaaaaaggatctcaagaagatcctttgatcttttctacggggtctgacgctcagtggaacgaaaactcacgttaagggattttggtcatgagattatcaaaaaggatcttcacctagatccttttaaattaaaaatgaagttttaaatcaatctaaagtatatatgagtaaacttggtctgacagttagaaaaactcatcgagcatcaaatgaaactgcaatttattcatatcaggattatcaataccatatttttgaaaaagccgtttctgtaatgaaggagaaaactcaccgaggcagttccataggatggcaagatcctggtatcggtctgcgattccgactcgtccaacatcaatacaacctattaatttcccctcgtcaaaaataaggttatcaagtgagaaatcaccatgagtgacgactgaatccggtgagaatggcaaaagtttatgcatttctttccagacttgttcaacaggccagccattacgctcgtcatcaaaatcactcgcatcaaccaaaccgttattcattcgtgattgcgcctgagcgagacgaaatacgcgatcgctgttaaaaggacaattacaaacaggaatcgaatgcaaccggcgcaggaacactgccagcgcatcaacaatattttcacctgaatcaggatattcttctaatacctggaatgctgttttcccagggatcgcagtggtgagtaaccatgcatcatcaggagtacggataaaatgcttgatggtcggaagaggcataaattccgtcagccagtttagtctgaccatctcatctgtaacatcattggcaacgctacctttgccatgtttcagaaacaactctggcgcatcgggcttcccatacaatcgatagattgtcgcacctgattgcccgacattatcgcgagcccatttatacccatataaatcagcatccatgttggaatttaatcgcggcctagagcaagacgtttcccgttgaatatggctcatactcttcctttttcaatattattgaagcatttatcagggttattgtctcatgagcggatacatatttgaatgtatttagaaaaataaacaaataggggttccgcgcacatttccccgaaaagtgccacctgacgtctaagaaaccattattatcatgacattaacctataaaaataggcgtatcacgaggccctttcgtc

SEQ ID NO: 98 - DNA, 3434 bp, Artificial Sequence
  pLMTB8528
tcgcgcgtttcggtgatgacggtgaaaacctctgacacatgcagctcccggagacggtcacagcttgtctgtaagcggatgccgggagcagacaagcccgtcagggcgcgtcagcgggtgttggcgggtgtcggggctggcttaactatgcggcatcagagcagattgtactgagagtgcaccatatgcggtgtgaaataccgcacagatgcgtaaggagaaaataccgcatcaggcgccattcgccattcaggctgcgcaactgttgggaagggcgatcggtgcgggcctcttcgctattacgccagctggcgaaagggggatgtgctgcaaggcgattaagttgggtaacgccagggttttcccagtcacgacgttgtaaaacgacggccagtgaattgacgcgtattgggatatttaaatcccgcacctcaacggagcgctttgccgaggttatcaacaaccccgagacctggaacgtgagcgcacaaaagcgctttatcgacctgaacctgggcgggtccgggggcgagcagaagctcatctcggaagaagacctcgagcagaaactcattagtgaggaggacttggagcagaagctgatctcggaggaagatctctgaacttttgatggcactgtttttctttacttttatttctctcaaaacatcagaagcagtaatgtaaatattcattttgtttcagcgctcgtgccaaacatcacgcgcttgttcaagaggctatgcgaagtgatcattgccgttttttttttcctcagcgtaagcggtgcatatgctcaaaatgcatgtgcttgtggaaaatcaaggcaactttgcatctcctgttgagagttctagtccagcaatctatccatggccttttcttctttgggatacttttatcgcgatgctttgcgcttcgtctctaccccttctgtatcctacaaaaatatcataacgccgattatgtgctcgatgcgctgcttcgaatagctctgttttcttcatttaacacgatggactacaaggaccacgacggcgactacaaggatcacgatatcgactacaaggatgacgatgacaagggtggtagcggaggtgctagcgccacatttacgggagtcatacctcctgtgatgacgccgcttcacgctgacggttctgtggacgtagagagcctccggaagctcgtcgaccatctgatcaacggcggtgtatttaaatatcccaatggcgcgccgagcttggctcgagcatggtcatagctgtttcctgtgtgaaattgttatccgctcacaattccacacaacatacgagccggaagcataaagtgtaaagcctggggtgcctaatgagtgagctaactcacattaattgcgttgcgctcactgcccgctttccagtcgggaaacctgtcgtgccagctgcattaatgaatcggccaacgcgcggggagaggcggtttgcgtattgggcgctcttccgcttcctcgctcactgactcgctgcgctcggtcgttcggctgcggcgagcggtatcagctcactcaaaggcggtaatacggttatccacagaatcaggggataacgcaggaaagaacatgtgagcaaaaggccagcaaaaggccaggaaccgtaaaaaggccgcgttgctggcgtttttccataggctccgcccccctgacgagcatcacaaaaatcgacgctcaagtcagaggtggcgaaacccgacaggactataaagataccaggcgtttccccctggaagctccctcgtgcgctctcctgttccgaccctgccgcttaccggatacctgtccgcctttctcccttcgggaagcgtggcgctttctcatagctcacgctgtaggtatctcagttcggtgtaggtcgttcgctccaagctgggctgtgtgcacgaaccccccgttcagcccgaccgctgcgccttatccggtaactatcgtcttgagtccaacccggtaagacacgacttatcgccactggcagcagccactggtaacaggattagcagagcgaggtatgtaggcggtgctacagagttcttgaagtggtggcctaactacggctacactagaagaacagtatttggtatctgcgctctgctgaagccagttaccttcggaaaaagagttggtagctcttgatccggcaaacaaaccaccgctggtagcggtggtttttttgtttgcaagcagcagattacgcgcagaaaaaaaggatctcaagaagatcctttgatcttttctacggggtctgacgctcagtggaacgaaaactcacgttaagggattttggtcatgagattatcaaaaaggatcttcacctagatccttttaaattaaaaatgaagttttaaatcaatctaaagtatatatgagtaaacttggtctgacagttagaaaaactcatcgagcatcaaatgaaactgcaatttattcatatcaggattatcaataccatatttttgaaaaagccgtttctgtaatgaaggagaaaactcaccgaggcagttccataggatggcaagatcctggtatcggtctgcgattccgactcgtccaacatcaatacaacctattaatttcccctcgtcaaaaataaggttatcaagtgagaaatcaccatgagtgacgactgaatccggtgagaatggcaaaagtttatgcatttctttccagacttgttcaacaggccagccattacgctcgtcatcaaaatcactcgcatcaaccaaaccgttattcattcgtgattgcgcctgagcgagacgaaatacgcgatcgctgttaaaaggacaattacaaacaggaatcgaatgcaaccggcgcaggaacactgccagcgcatcaacaatattttcacctgaatcaggatattcttctaatacctggaatgctgttttcccagggatcgcagtggtgagtaaccatgcatcatcaggagtacggataaaatgcttgatggtcggaagaggcataaattccgtcagccagtttagtctgaccatctcatctgtaacatcattggcaacgctacctttgccatgtttcagaaacaactctggcgcatcgggcttcccatacaatcgatagattgtcgcacctgattgcccgacattatcgcgagcccatttatacccatataaatcagcatccatgttggaatttaatcgcggcctagagcaagacgtttcccgttgaatatggctcatactcttcctttttcaatattattgaagcatttatcagggttattgtctcatgagcggatacatatttgaatgtatttagaaaaataaacaaataggggttccgcgcacatttccccgaaaagtgccacctgacgtctaagaaaccattattatcatgacattaacctataaaaataggcgtatcacgaggccctttcgtc

SEQ ID NO: 99 - DNA, 3927 bp, Artificial Sequence
  pLMTB8529
tcgcgcgtttcggtgatgacggtgaaaacctctgacacatgcagctcccggagacggtcacagcttgtctgtaagcggatgccgggagcagacaagcccgtcagggcgcgtcagcgggtgttggcgggtgtcggggctggcttaactatgcggcatcagagcagattgtactgagagtgcaccatatgcggtgtgaaataccgcacagatgcgtaaggagaaaataccgcatcaggcgccattcgccattcaggctgcgcaactgttgggaagggcgatcggtgcgggcctcttcgctattacgccagctggcgaaagggggatgtgctgcaaggcgattaagttgggtaacgccagggttttcccagtcacgacgttgtaaaacgacggccagtgaattgacgcgtattgggatatttaaataccacctgtttcacatcgtgttcgtgggagatacgtcgcacatgtcgggctcaagcgctggcctcggcggctttaaaactgccctcgcgcaccttggaatcatcgagtctaacgcgatggccgtgccgcaccagtcgctctctgacgaggagacggcgcgcatccacgccatagtggacgagtttttgtacacagcgtgaagagggcgtgcctggggagagggagacattggcggcccaggtggtgcgtgtgcgcggatctgcgtgcagaggtgcgcagggcgcgcgctctcgtcttttggtctctttctgttttcgctttatttctgtttttttctccttttcaacagcaagaacagccaccacgcgcaccaagcgaaggtaacgtgagactcggcttgtgggattgcttcggtgcgcggggggggaacggcgaggaggtggggtggtgggtggggacctcccctcatctgcctcctgcgcagcaccccatcactcacgcgcacacagatgagcaagtccgccgacgcactgcaggccacccaactgtgcttcgtgttgctcgtgcatcgatctccctctgtgcaagcgaataggctctcctcagatcagatgtgattttcgttcccctccacatcacttcctcgagcagctgacctttaccatgtcttcgcaggcgatgacggcgcccactaggcctcgccccctccaccgctgttgccaacattgcaactgcttctctgtacttctctgtgtttctcgaactctcttccccctcccccaccgtttccatctccgcgcgtgtgcgcgtcgctgtacactcttcgctggatgccggatcccacgcaaacacacacgcacacacacacacacacatcagacgtgcctcacaaacccgttcgtgctcgaacatcgacagcgcacccagacgtgtggtcttgctcttcttcctttcgctcgttctcagctcttcttcctccttacccagtacgacgagctctgacctcttgtcgtgtgcccgcctgtgtgccatacacctggcacccactcctaaacacgcacttatcacacctccatcgcaacaccatgcagaataacaacgaatttaagatcggcaaccgctctgtaggctacaaccatgagccgctgattatctgcgagattggcatcaatcacgaaggcagcctgaagacggcttttgagatggtggatgccgcctataacgctggggcagaggtggtgaaacaccaaacccacattgttgaggacgaaatgagcgacgaagcatttaaatatcccaatggcgcgccgagcttggctcgagcatggtcatagctgtttcctgtgtgaaattgttatccgctcacaattccacacaacatacgagccggaagcataaagtgtaaagcctggggtgcctaatgagtgagctaactcacattaattgcgttgcgctcactgcccgctttccagtcgggaaacctgtcgtgccagctgcattaatgaatcggccaacgcgcggggagaggcggtttgcgtattgggcgctcttccgcttcctcgctcactgactcgctgcgctcggtcgttcggctgcggcgagcggtatcagctcactcaaaggcggtaatacggttatccacagaatcaggggataacgcaggaaagaacatgtgagcaaaaggccagcaaaaggccaggaaccgtaaaaaggccgcgttgctggcgtttttccataggctccgcccccctgacgagcatcacaaaaatcgacgctcaagtcagaggtggcgaaacccgacaggactataaagataccaggcgtttccccctggaagctccctcgtgcgctctcctgttccgaccctgccgcttaccggatacctgtccgcctttctcccttcgggaagcgtggcgctttctcatagctcacgctgtaggtatctcagttcggtgtaggtcgttcgctccaagctgggctgtgtgcacgaaccccccgttcagcccgaccgctgcgccttatccggtaactatcgtcttgagtccaacccggtaagacacgacttatcgccactggcagcagccactggtaacaggattagcagagcgaggtatgtaggcggtgctacagagttcttgaagtggtggcctaactacggctacactagaagaacagtatttggtatctgcgctctgctgaagccagttaccttcggaaaaagagttggtagctcttgatccggcaaacaaaccaccgctggtagcggtggtttttttgtttgcaagcagcagattacgcgcagaaaaaaaggatctcaagaagatcctttgatcttttctacggggtctgacgctcagtggaacgaaaactcacgttaagggattttggtcatgagattatcaaaaaggatcttcacctagatccttttaaattaaaaatgaagttttaaatcaatctaaagtatatatgagtaaacttggtctgacagttagaaaaactcatcgagcatcaaatgaaactgcaatttattcatatcaggattatcaataccatatttttgaaaaagccgtttctgtaatgaaggagaaaactcaccgaggcagttccataggatggcaagatcctggtatcggtctgcgattccgactcgtccaacatcaatacaacctattaatttcccctcgtcaaaaataaggttatcaagtgagaaatcaccatgagtgacgactgaatccggtgagaatggcaaaagtttatgcatttctttccagacttgttcaacaggccagccattacgctcgtcatcaaaatcactcgcatcaaccaaaccgttattcattcgtgattgcgcctgagcgagacgaaatacgcgatcgctgttaaaaggacaattacaaacaggaatcgaatgcaaccggcgcaggaacactgccagcgcatcaacaatattttcacctgaatcaggatattcttctaatacctggaatgctgttttcccagggatcgcagtggtgagtaaccatgcatcatcaggagtacggataaaatgcttgatggtcggaagaggcataaattccgtcagccagtttagtctgaccatctcatctgtaacatcattggcaacgctacctttgccatgtttcagaaacaactctggcgcatcgggcttcccatacaatcgatagattgtcgcacctgattgcccgacattatcgcgagcccatttatacccatataaatcagcatccatgttggaatttaatcgcggcctagagcaagacgtttcccgttgaatatggctcatactcttcctttttcaatattattgaagcatttatcagggttattgtctcatgagcggatacatatttgaatgtatttagaaaaataaacaaataggggttccgcgcacatttccccgaaaagtgccacctgacgtctaagaaaccattattatcatgacattaacctataaaaataggcgtatcacgaggccctttcgtc

SEQ ID NO: 100 - DNA, 3978 bp, Artificial Sequence
  pLMTB8531
tcgcgcgtttcggtgatgacggtgaaaacctctgacacatgcagctcccggagacggtcacagcttgtctgtaagcggatgccgggagcagacaagcccgtcagggcgcgtcagcgggtgttggcgggtgtcggggctggcttaactatgcggcatcagagcagattgtactgagagtgcaccatatgcggtgtgaaataccgcacagatgcgtaaggagaaaataccgcatcaggcgccattcgccattcaggctgcgcaactgttgggaagggcgatcggtgcgggcctcttcgctattacgccagctggcgaaagggggatgtgctgcaaggcgattaagttgggtaacgccagggttttcccagtcacgacgttgtaaaacgacggccagtgaattgacgcgtattgggatatttaaatcccttcttttcgagaagaatatggtcaagcacctcaacgagggtacggatgaggacatttacctgtttgggaaggcaacactctccggatttcgtaacaaccgttgcgcaggagcatacccctacgacgtgccagattacgcctacccttacgatgtaccggactacgcttacccgtacgacgtgccggactacgcgtagagagcaattgagcgcgtgcgtgtcggtgttcgggtgtgtttatggtcactgaggagggaggagagaaatgcagggcttcctcctcgtgtgttgctctctgtttcgttctcccttccccgtagcctgctgccgcactctgctcgtcccgtgcgtccagacctctgtagcctttcgattcctttatcttttttgttttaattttcttttttgtccgtatgcttcccagaaacgaaaaaaagaacaagaaaggacgaagtacaagtggatgtgcgccgagagcacgtctgcccccctgtgaaggagcgcagcggatgcgtgctccgctccactcggtcatctctgccgtccctcaggcacggcaggcccaggagagttcaaggagcttgatgctgcattgcaaggcgaatgcgttttttttttcgttcgccctccgccagcggtgctcatgaactgcgatgcactcgagttcccgaaagagcagcgagccactgtttcttcgtcgagagtatcgctgaggcacggcgtgcttgcgattgctcgctctgcaagtgcgcgtgcatggcggctctctttgcagtgctcctctacttttctccctctgttctgcgctgccatgcctccttgtatgcctcggcccacgatcactcacgcctgcgcacaaacgcatactttctttttccactcgttctccacggtgcgccttgattcgcactcgtccaatgactagggcgtgtggagagaagagaaggtacagatagcgccaggaggcggctgagcagggagacacacgctggcacacgtcaacgtatagcgcacacccacgtcccacttctgtacggctgctctcttcctactagttggccatattcagcccttcgttctgcccatagtcccagttatcgaagtgacgctgcatgatatagctgcgagcacacaatggagaaacagaacatcgcggtcatcctcgcgcggcagaactccaaggggctgccactcaagaacctgcgtaagatgaacggaatcagtctcctcggccacacgatcaatgcggcgatctcgtctaagtgcttcgaccgcatcattgtgtctacggacggagggcttattgcggaggaggctaagaacttcggggttgaatttaaatatcccaatggcgcgccgagcttggctcgagcatggtcatagctgtttcctgtgtgaaattgttatccgctcacaattccacacaacatacgagccggaagcataaagtgtaaagcctggggtgcctaatgagtgagctaactcacattaattgcgttgcgctcactgcccgctttccagtcgggaaacctgtcgtgccagctgcattaatgaatcggccaacgcgcggggagaggcggtttgcgtattgggcgctcttccgcttcctcgctcactgactcgctgcgctcggtcgttcggctgcggcgagcggtatcagctcactcaaaggcggtaatacggttatccacagaatcaggggataacgcaggaaagaacatgtgagcaaaaggccagcaaaaggccaggaaccgtaaaaaggccgcgttgctggcgtttttccataggctccgcccccctgacgagcatcacaaaaatcgacgctcaagtcagaggtggcgaaacccgacaggactataaagataccaggcgtttccccctggaagctccctcgtgcgctctcctgttccgaccctgccgcttaccggatacctgtccgcctttctcccttcgggaagcgtggcgctttctcatagctcacgctgtaggtatctcagttcggtgtaggtcgttcgctccaagctgggctgtgtgcacgaaccccccgttcagcccgaccgctgcgccttatccggtaactatcgtcttgagtccaacccggtaagacacgacttatcgccactggcagcagccactggtaacaggattagcagagcgaggtatgtaggcggtgctacagagttcttgaagtggtggcctaactacggctacactagaagaacagtatttggtatctgcgctctgctgaagccagttaccttcggaaaaagagttggtagctcttgatccggcaaacaaaccaccgctggtagcggtggtttttttgtttgcaagcagcagattacgcgcagaaaaaaaggatctcaagaagatcctttgatcttttctacggggtctgacgctcagtggaacgaaaactcacgttaagggattttggtcatgagattatcaaaaaggatcttcacctagatccttttaaattaaaaatgaagttttaaatcaatctaaagtatatatgagtaaacttggtctgacagttagaaaaactcatcgagcatcaaatgaaactgcaatttattcatatcaggattatcaataccatatttttgaaaaagccgtttctgtaatgaaggagaaaactcaccgaggcagttccataggatggcaagatcctggtatcggtctgcgattccgactcgtccaacatcaatacaacctattaatttcccctcgtcaaaaataaggttatcaagtgagaaatcaccatgagtgacgactgaatccggtgagaatggcaaaagtttatgcatttctttccagacttgttcaacaggccagccattacgctcgtcatcaaaatcactcgcatcaaccaaaccgttattcattcgtgattgcgcctgagcgagacgaaatacgcgatcgctgttaaaaggacaattacaaacaggaatcgaatgcaaccggcgcaggaacactgccagcgcatcaacaatattttcacctgaatcaggatattcttctaatacctggaatgctgttttcccagggatcgcagtggtgagtaaccatgcatcatcaggagtacggataaaatgcttgatggtcggaagaggcataaattccgtcagccagtttagtctgaccatctcatctgtaacatcattggcaacgctacctttgccatgtttcagaaacaactctggcgcatcgggcttcccatacaatcgatagattgtcgcacctgattgcccgacattatcgcgagcccatttatacccatataaatcagcatccatgttggaatttaatcgcggcctagagcaagacgtttcccgttgaatatggctcatactcttcctttttcaatattattgaagcatttatcagggttattgtctcatgagcggatacatatttgaatgtatttagaaaaataaacaaataggggttccgcgcacatttccccgaaaagtgccacctgacgtctaagaaaccattattatcatgacattaacctataaaaataggcgtatcacgaggccctttcgtc

SEQ ID NO: 101 - DNA, 4007 bp, Artificial Sequence
  pLMTB8532
tcgcgcgtttcggtgatgacggtgaaaacctctgacacatgcagctcccggagacggtcacagcttgtctgtaagcggatgccgggagcagacaagcccgtcagggcgcgtcagcgggtgttggcgggtgtcggggctggcttaactatgcggcatcagagcagattgtactgagagtgcaccatatgcggtgtgaaataccgcacagatgcgtaaggagaaaataccgcatcaggcgccattcgccattcaggctgcgcaactgttgggaagggcgatcggtgcgggcctcttcgctattacgccagctggcgaaagggggatgtgctgcaaggcgattaagttgggtaacgccagggttttcccagtcacgacgttgtaaaacgacggccagtgaattgacgcgtattgggatatttaaatctcccacgaaactctacatcatgtcccatcaagattcgattgatatcgacacggagttggatctgcagcaggcggagaacatactgaatcacaaggagtccggagggagtggcggttacccgtacgacgtgcccgactacgcctacccgtacgatgtgccggattacgcgtatccatatgacgtgccagactatgcgtaggtcgaacgctcacttttgagcacacgactctctacttgtctcccgctctgatgtctctttccttatttctgcgcctgcaggtaaaagaagtgcatccgcatggctgtcttttaacggggacagcgaggcgtgctggcggcaactgtgtgcgcttgtgtgcgcgcacgttacgctgagagaacctcacatttcctttttgtttttactgttaattttctgtatgtccttttctcggcctcttgtcgcgtctgctccccccccgatggggcgctggcgaggcggagaggtcataggttcctcgttataagccagtagcggtgctgcacgggcatgccctatggagggagaaggggtgctgcgtggaaaagggagcgcagtgcgccagaacacaagcgtgcgcgcttgtaggtgcgcacatgtttgctacttttttttctctccgttccgctctggctagtgatcttcgccactgccgagtgggtgttggcctgctgcagagactgcaacattgctcccggtgcgggctgtgtgcggtcatcgcgtgtgcgcagctgcagtgtgcggaggggccgtccaggcacggtcttacttcaatctccgctgctatgggtgcgtcctgatgaaggccctgcctacggatcgcctttctgtaggcgctcttgtccatctctgctgtagctcaactttctgcgcttgtttttcctctttttgttcttcggcatctccgcctttgttggtgactggtactgccttgcgtctccatgaactaaaacaacggctgcatatcttccccttcccttgcggatataaaactcgtacctgtgcgactttctcacgttcgccgcacgctcacggacgttcgacgtccaatcgatgcgcgcatgcgcaccatgacgctttttcgaagtttctacgcctcgccatcgtacagacacttaagctaacaactcgctcacacactcgagatggctgcccctcgcgataacgtcacactcctgtttaagctttattgcctggccgtgatgacacttatggctgcagtctacaccattgccctccgctacacgcgcactagcgacaaagaattgtattttagtacaacggccgtgtgcatcacagaggtgatcaagctcctgttgtccgtcggcatcctcgctaaagagacatttaaatatcccaatggcgcgccgagcttggctcgagcatggtcatagctgtttcctgtgtgaaattgttatccgctcacaattccacacaacatacgagccggaagcataaagtgtaaagcctggggtgcctaatgagtgagctaactcacattaattgcgttgcgctcactgcccgctttccagtcgggaaacctgtcgtgccagctgcattaatgaatcggccaacgcgcggggagaggcggtttgcgtattgggcgctcttccgcttcctcgctcactgactcgctgcgctcggtcgttcggctgcggcgagcggtatcagctcactcaaaggcggtaatacggttatccacagaatcaggggataacgcaggaaagaacatgtgagcaaaaggccagcaaaaggccaggaaccgtaaaaaggccgcgttgctggcgtttttccataggctccgcccccctgacgagcatcacaaaaatcgacgctcaagtcagaggtggcgaaacccgacaggactataaagataccaggcgtttccccctggaagctccctcgtgcgctctcctgttccgaccctgccgcttaccggatacctgtccgcctttctcccttcgggaagcgtggcgctttctcatagctcacgctgtaggtatctcagttcggtgtaggtcgttcgctccaagctgggctgtgtgcacgaaccccccgttcagcccgaccgctgcgccttatccggtaactatcgtcttgagtccaacccggtaagacacgacttatcgccactggcagcagccactggtaacaggattagcagagcgaggtatgtaggcggtgctacagagttcttgaagtggtggcctaactacggctacactagaagaacagtatttggtatctgcgctctgctgaagccagttaccttcggaaaaagagttggtagctcttgatccggcaaacaaaccaccgctggtagcggtggtttttttgtttgcaagcagcagattacgcgcagaaaaaaaggatctcaagaagatcctttgatcttttctacggggtctgacgctcagtggaacgaaaactcacgttaagggattttggtcatgagattatcaaaaaggatcttcacctagatccttttaaattaaaaatgaagttttaaatcaatctaaagtatatatgagtaaacttggtctgacagttagaaaaactcatcgagcatcaaatgaaactgcaatttattcatatcaggattatcaataccatatttttgaaaaagccgtttctgtaatgaaggagaaaactcaccgaggcagttccataggatggcaagatcctggtatcggtctgcgattccgactcgtccaacatcaatacaacctattaatttcccctcgtcaaaaataaggttatcaagtgagaaatcaccatgagtgacgactgaatccggtgagaatggcaaaagtttatgcatttctttccagacttgttcaacaggccagccattacgctcgtcatcaaaatcactcgcatcaaccaaaccgttattcattcgtgattgcgcctgagcgagacgaaatacgcgatcgctgttaaaaggacaattacaaacaggaatcgaatgcaaccggcgcaggaacactgccagcgcatcaacaatattttcacctgaatcaggatattcttctaatacctggaatgctgttttcccagggatcgcagtggtgagtaaccatgcatcatcaggagtacggataaaatgcttgatggtcggaagaggcataaattccgtcagccagtttagtctgaccatctcatctgtaacatcattggcaacgctacctttgccatgtttcagaaacaactctggcgcatcgggcttcccatacaatcgatagattgtcgcacctgattgcccgacattatcgcgagcccatttatacccatataaatcagcatccatgttggaatttaatcgcggcctagagcaagacgtttcccgttgaatatggctcatactcttcctttttcaatattattgaagcatttatcagggttattgtctcatgagcggatacatatttgaatgtatttagaaaaataaacaaataggggttccgcgcacatttccccgaaaagtgccacctgacgtctaagaaaccattattatcatgacattaacctataaaaataggcgtatcacgaggccctttcgtc

SEQ ID NO: 102 - DNA, 18 bp, Artificial Sequence
  oLMTB228
cttcacttcggccgtcgg

SEQ ID NO: 103 - DNA, 18 bp, Artificial Sequence
  oLMTB229
gatcgccgccgagaatgc

SEQ ID NO: 104 - DNA, 23 bp, Artificial Sequence
  oLMTB4949
gatctggttgattctgccagtag

SEQ ID NO: 105 - DNA, 19 bp, Artificial Sequence
  oLMTB4978
gtgggaaaggtatcctctc

SEQ ID NO: 106 - DNA, 35 bp, Artificial Sequence
  oLMTB5976
aagtgggcactaagcagacagctccttggcatacg

SEQ ID NO: 107 - DNA, 35 bp, Artificial Sequence
  oLMTB6045
actatcatgccctacgtgggccacgcagcgatgag

SEQ ID NO: 108 - DNA, 21 bp, Artificial Sequence
  oLMTB6517
ctgtgaatgtacgagccaagg

SEQ ID NO: 109 - DNA, 20 bp, Artificial Sequence
  oLMTB6521
gaatcagtagtgccgcaagc

SEQ ID NO: 110 - DNA, 29 bp, Artificial Sequence
  oLMTB6775
atcatcgcgattaatagccgaatcagttt

SEQ ID NO: 111 - DNA, 28 bp, Artificial Sequence
  oLMTB6776
acataggaagccagttcatccatcgctt

SEQ ID NO: 112 - DNA, 752 bp, Artificial Sequence
  IrA
tcgagggaggaggaggaggcgcgtagcattgcgtgcgggttatgtgtgcgtgcgtgtgtgtgtgcggtgcgcgcctttcctcttttttttctccctctcgtcggttttttttttctgaggagacggggcgaagacgcgagcggggggcggcgtttgtgtgtgtgtgtgcgcgtgtcgggggcagcggtgttggcggaacggccaacgccctgccccctccccgccctgcgacgtttctgcgcacccgttctctccttcctgcgtgcgtgtctgcgcgcatgcacatctgtccgcgtgtgccgcagcgctggtatttttgtgagggcagagccctgcctccccgcctctctgccgttggcaggtgaagcgaaaacgaagcgagagggcagtctgcatgtgtgtgcgagggcatgcggagcccccctccccccgccccctgccgtgctgcaccgctattgtggcgtcttctctcgttgtgcgcaagtgtggctgcaccacggccgcctcatgtgcgtgtgtgcgcatgtacacacacacacacacacacacacacacacgggcaggcgcacgctcctctctcttcagggagcgccgccccgctggtgtcattggacgagcatccgccgcgcatctcttcacccctcacccctcatccctctcccctctccccgcacacacacgcagtccttcgctttcactcttcgaacaaacacctcaaccatcttatcacctttctctcttccttgtcaacc

SEQ ID NO: 113 - DNA, 1466 bp, Artificial Sequence
  IrB
gagacaaacgtggcggatgtgatgttttcagtttacttcgcctcttttcgttttcctttcaggcgacttcccttttgagttttcgtgtatgcaattgttgctgttctactgtgcagttgtcaccagcgccgcttttgggcttgtggcgtcggtgattctgcctacgtgattcttctccacgttaaccacacgtgttattgcccttcgcttttgcgtgcgcggtctgggcagccactaggtataggggtgtggtggagtgcacccgtgacggtgacatcccttcgacccgcgtctgctgcctcagacgttcgtggagagctgacatgtcgacatccctttggtgtgagcatttgtgagcgtgtgggtgtttagtgtttttgttaccggttttgttgcgcttgtgtgctctagtagtgtttgtgcgcgtgcgtggggcactatgaagcaagctgcggtagatgcgctgcgtggggtggtaggctgcaggactacaaccattaagattcctctctctctccttggctcgctctacattgaccctctgcggtggtctgcttctctacaatcgatatgcccgacacctcccgttgtgtgttcgttctcctttatcactaggccattgcattcggccctgttgatgtggctacggtcttagacacgcacaaatggtttgcattatttatcggccatggtgtgtgtcacactcgcttgattgattttgttctgatgtgcagcatgaaatgtcgggagaataaaacatagtgccttcatcataggatgacggatgcttgaatccgtctttgtcttctgaacaactctctgcagagggcgcgggtggctgacttctctcccccttcgtatggcgaaaggatggctttggcgtccttccgggcttcgcgcgcataggggagcagaatatgtgctgcaaagaagacgcctggcggctgcgtgcgtgcgtacgtgtgagtgtgtgtgtgtgtgagggctacgctgccggcaccactactcgtgcctatcttcaccaccttctcgttctcctccgtcttctcttttgcctggtgagcatttgtgttcaccatacctcaacgcgcttcgcatagctgcccaacctcctactactctgtttggctaatctcagctcgttagtttctctcgttaatcataacgagtttgcccctcccccccattgtgtgtgtgtgtcttgtaaaaaaaaaaaaaaaacattatcttctacctttccgcgcctcacatccgcatctttcgtgtgctgcccactcaccatcaccggcctccttcgttggcagagcaacatttgttcatgagcagctctccgtactgtgtgtgtgcccactagccggtgcagagtaggagccgcgcttttgttgttgtacgtatcttttgacgtgggtgtgcgtgcaagcaaggatctacgcgcaacaagtagcaggcaagcggatctgttcgcc

SEQ ID NO: 114 - DNA, 1339 bp, Artificial Sequence
  IrC
cctcctcctcctttcttgttcctttcacgtcgccttctcggttgtagctggcagacgacgagtcttacttttacgtgtacttctctatagatgatgtatgatctctctgcatgcgtgttcgtgcatgtgtccgtgtgttgtgtacgcgtgcgtctcgcctcagctctccgcgtgaaagggtttgactgcccatgatgcgtgtgtatatccacgcgcaggcacgcacacacacacacacacacacacacacaggcacacacaggcacacaaacgcatctcaggccgagccgcatacgtctctcgcacggtctcgtttatttgatcatgtagttgagtattaaattgggaagacaaaaacataatagcacgaagagtcgggcacgaaaagcccgatctctctctctctctctcgtgcgcgcaggggcgtgtgggtgcacgacgacgaggacggaggggggaagggaggcataaacggatcgatcccccatcgcacatgcgggtacgagcattatctgctgtgtctggtcctttatcatatcgctacccgcccgccccccgcccccctcccccccccccccccgcggctcctgtcactgtcgttcctgcgactccccacacacccgcgcaacgctcatgtcacgaagagaaaagtagaaggcgtggcgatgcgttgcgcggccccctgtccgctggcatgcagacgtcgagccgtggaacggatggtagcgagagacaacgcggcgatgcaggaaaggagatttactgcaggacgtctacacacgcgcgcacaccactgcgaatggcaccgtgctgaggaaaattgggggggagggcgcacgggggcggggcaggaaacggttggatcagcagcactctcaacttgtgtccgtattgcgaaggagggagaggagcctgcccgtattatgggcgctgaaacgtcggaaccacctatgaatcccacttctgcgtcgcggaggcgtactgcttccgaccacctccgcagctcacgcgcgtcgagctccctccctttccccttctttccgttgtgtgtgtgtgtgtgtgtgtgtcttgtcacgatgcatggccatctctcctccaaccctccacgccttcctctcccccgcccatcaaacgcgctacggccacaaccatttcttcaagtatcacatccaccaccactcttacccacctaccctcttcgactctgacacagccactgacgccctctccgcctctctcgctcgctgcacattgactctccacagccccccctccctcgcacagccagccccacccacccacccacccacccaccgctctacacacctccacagcagcc

SEQ ID NO: 115 - DNA, 2141 bp, Artificial Sequence
  IrD
ggagactgagctttagcgagggaacccgcatggcatacgttgccataacaagtgaccatctactctccttaaagtcatgggggtgctgctgcttggccggtgctgatcactcttgttgaggttccttcaggtgcggggactctctttggcgccttccctgcttgccgtgctctctcgacttgttctaattcccacgtgtgctctcttccgctttcgttgtagtggtgtacgctgcggttgagcttgttgtgcttgcgctacatttctcttcgaaggcggaggcaggcgcgcctgcgcagtgccgtgacgagagccactgccgtgtcgagctgcgagcaagagcagttaaggcaaaagggtaggtgagaaagatgactctgtgcggtgctctcttgtccatgcctgtccgttgttgtctcccctgtctctcccttttttcggcttgagtgacgttttgctgcctttgtacgttgttgtagtgtccttactgctctcgattgccgtcacgttgatgcccctatgtgtctccttttcttgcctcgcacattgcggatgtgctcccttctccgcccccttttttttttttttgccacagccggtgctgccttgttgcgagagcatgcgcatttggaacaaatggcacatagtcgtagcatctgcgctctggcctcggcgcctctctacacctttgctcaccgtgcatcacgccatctacaccatgttctcttcgtgttctgccactcttttaaatgctttgccttcccttggaatcccatgctcagccctcccctgcttctcacggtgcctgtggctctcggctgcgctctcctgtcgcctgttcttcttcttccgtccctgtggatgctgccgatttcccgtctgcccccgtctttcgtttgccgcctcccccttctgtgacgaatgccgtctctgtatcccggacgctccctcacgccaacccactcctcttttgcgttcttgcgtgtgcgtcgggcttctctccctccccctccccctccccctcccctgcctaccccatcaccgatgggtgtgtgggagagaggtggcaggggaagagggagtgcagataatgtgagacagaattgaaatatctgctctccgacacacagggagtaaatgcattcaacagggatggtaaggacacgcactggcgtgacatggagaaaaaataatggagtaatgcatgcagggctgaactcggcacagaggtacgcacccgtgggcaccctcttctctacggccctacctctttgtctccaatcgttttgtccccgtatgtcattattattgctcacctcgcggcattcttgatgtagccgcctcttgacatgtatagtgttgttcattagtatccaccgcaagaaaagaaatcctgcataccaccaatcgcgcgcactggacgttgccgaaagcagtcagtgggcaccttggacgttgccgccggtgtggaagtggccgcgtcgcaagcaggcctccatgacgttgactgcacgtccctcccggaaaggggatggctttggtgccatttaggacacaaatggagcttcttgtcgacccttgcttcgaggaatgaggctgcgtgtatgtgtcttggtgacccctttgggctgtgcagcttgtggcgtgtgcgcaccggcgtgtgccaacgcccaggtactgtgcgcacgttcgtatctccatacgctagctgaccgagacgcatgccctccgccaccctcagtggcgcgcaccttctctcgtttgagctctttatgctctcgtgaatggcacacaacatcccgtgactatcacgatgatccttctcaagccacaccgcttgccttttctacagctctgcgttctctggcccatcctcctcttgtttgctttccctctttgcacatccgtgtgcgcgtccttgttcttctcttctgcgcacactattctgcgcccgcgacccgcgcttcgactgctgtcgggtcatgccttgtgctgcgcgttcagctcttcattgcccctcggccttgtacatagcggctctccgtcatcgacgttttcctctctcttcagctctatacactccctcccttgtcaacacactacactgtgtctccccctttcatctctcctcccctgtcaca

SEQ ID NO: 116 - DNA, 606 bp, Artificial Sequence
  IrE
ttagcgctccgtagctcgctgcgtatgagaggtactgagctccaatgcatcacacggcgtacggcaacacacactatcttttcagtttatttttttaattatccctccaaaaagaagcaactgacacttcaaaatattcccaacaaggagcgtgaggtcagtgaccagtctcggacttcacaccgcgcatgtagaagcacgcggcttgcgcgccaggcttcttttggcaaaccacgctgcacagaatgtctgtgtacagcagccaggctgtgatcgatctattatgctcgcccctcgctcctccggcattctcgagtccatgtcgagcttgtctggctccgtgcacatgcaagcgtttgtgcgcgcctctaatgtaaccacacgtcaaaacattgtgtgtcttccgaagtgggagacaccggggccaccaactccggtggtttacagcctcctccctcaaccaacgctgccgattgtaccacctttcattgcgtctttgtgcccctccctatcttcatgtttccactgcgcttcgtttccgaatactattttcgtgtactgtttcatcactttctcacaacagctcttttttttcacccgcagaag

SEQ ID NO: 117 - DNA, 1579 bp, Artificial Sequence
  PolB
gcgtggggatggatcgcgagggacgcggggtttgagggccgtgggtggtgtggagagtgtggttgattattgtatggtggtgagggtggaaggtgtggcggggatggtggtgcggtggtgtcggaaggggtgtgtgagagggcgcgggtccttgagggagggtgggtgtgttgttgttttgcgggtgttatccggggcttgggtgttggtgtgattggtgactatgtaggggtgaagggtgagtggagggggtcgccagaggcgttccgttctacgaagcttcattcctatgtccgactccgaagcatgcctgcagttctgctggctatgtgggcgtgtctgggcaacgactgaattgagaaggggagtcgaaacggtgcgtggatgctgtgtttgtgctacacacaagcaaaggcaacaacacaagcgcatcgagccagacgaaccaacccaatattcacacaactgtacgtggccgcgcgctgtatctccgatgggatgatgcgtgtgcgtgtgccaccaccacgtactagtttccagccttactgcttgtataccttgtcttttgcgttgtgcttgcgcgtgctgtgtacctctgctcgtgcgttccgtatcccgggacctgcgggcggtgggtgccacacaacccgtcacattcaacatcactcatacatctcaccgatgtgtgcgtgtgcttgctgtgtgcgtgtgttgtgtggcgtcaaacctgtttgaaaacacacccctagcactattcgaccgcgaaagcgcccccccaaaggggccggtgtgcaatgcgagctacatgtatgtgtagagagcgctgcgccgaactagtcgtgcgtgctgaacatgttttgtgtgtgctgccgtgtctacacgtttgcagcggaaactcggttgaaccagaaacagaacttgattgttgctgcatttcgaggaatttcagccaaacaagaggtcaacaaccaagccgcgtgtacacatatacacacaccgcgtgtatgtatatatgcgtttgttttgttaccacaaatactgagttgtctgatgtgagcttctgctacagacgcaattcaggaaatacaacaaaatacaacacttgatcatcaatgcgcaatgtgcgcgtgttgtgtgtgtgtgtgcgagcgcacacacacatgcacacgactcacgttgtcacacaattgagagtcgcagcctgaccgcatcacacatcaaggcgttacagcctctccgtctttgctgcacccaagtgtattcgtgtgaccgcgttgagggatctaatggattcggaactttggtcgtttggtctctcatgctgcccaatcccatgcgcttttctccgtgcctctctgtctccccttccgttctatttggacaacgatgtgtactgtaatgcgtgcgccatctgacaacgaatagatcagcagcattcgcacacttgcacatacccagtgaagcttttgtgtctgtcgtattgacaacaccgactgcaacaaggtgtagatagaagttggccttctcgctcgctcgcacgctcttcacgctcctgctttccttgctgtgccttgccacc

SEQ ID NO: 118 - DNA, 387 bp, Artificial Sequence
  5UTR
agtcgcagcctgaccgcatcacacatcaaggcgttacagcctctccgtctttgctgcacccaagtgtattcgtgtgaccgcgttgagggatctaatggattcggaactttggtcgtttggtctctcatgctgcccaatcccatgcgcttttctccgtgcctctctgtctccccttccgttctatttggacaacgatgtgtactgtaatgcgtgcgccatctgacaacgaatagatcagcagcattcgcacacttgcacatacccagtgaagcttttgtgtctgtcgtattgacaacaccgactgcaacaaggtgtagatagaagttggccttctcgctcgctcgcacgctcttcacgctcctgctttccttgctgtgccttgccacc

SEQ ID NO: 119 - DNA, 1297 bp, Artificial Sequence
  PolA
gcgtggggatggatcgcgagggacgcggggtttgagggccgtgggtggtgtggagagtgtggttgattattgtatggtggtgagggtggaaggtgtggcggggatggtggtgcggtggtgtcggaaggggtgtgtgagagggcgcgggtccttgagggagggtgggtgtgttgttgttttgcgggtgttatccggggcttgggtgttggtgtgattggtgactatgtaggggtgaagggtgagtggagggggtcgccagaggcgttccgttctacgaagcttcattcctatgtccgactccgaagcatgcctgcagttctgctggctatgtgggcgtgtctgggcaacgactgaattgagaaggggagtcgaaacggtgcgtggatgctgtgtttgtgctacacacaagcaaaggcaacaacacaagcgcatcgagccagacgaaccaacccaatattcacacaactgtacgtggccgcgcgctgtatctccgatgggatgatgcgtgtgcgtgtgccaccaccacgtactagtttccagccttactgcttgtataccttgtcttttgcgttgtgcttgcgcgtgctgtgtacctctgctcgtgcgttccgtatcccgggacctgcgggcggtgggtgccacacaacccgtcacattcaacatcactcatacatctcaccgatgtgtgcgtgtgcttgctgtgtgcgtgtgttgtgtggcgtcaaacctgtttgaaaacacacccctagcactattcgaccgcgaaagcgcccccccaaaggggccggtgtgcaatgcgagctacatgtatgtgtagagagcgctgcgccgaactagtcgtgcgtgctgaacatgttttgtgtgtgctgccgtgtctacacgtttgcagcggaaactcggttgaaccagaaacagaacttgattgttgctgcatttcgaggaatttcagccaaacaagaggtcaacaaccaagccgcgtgtacacatatacacacaccgcgtgtatgtatatatgcgtttgttttgttaccacaaatactgagttgtctgatgtgagcttctgctacagacgcaattcaggaaatacaacaaaatacaacacttgatcatcaatgcgcaatgtgcgcgtgttgtgtgtgtgtgtgcgagcgcacacacacatgcacacgactcacgttgtcacacaattgagagctctctcttctccttcccctctctctcctctctcctctctccagagctctctcttctccttcccctctctctcctctctcctctctccagagctcgagccacc

SEQ ID NO: 120 - DNA, 623 bp, Artificial Sequence
  UtrA
ctagcctcggagatccactagttctagttctaggggccgaattcagatcctcgtgtgagcgttcgcggaatcggtcgctcgtgtttatgcccgtcttggtgttgtgctcgcaaggcggtgcagcaggataccgtcgccctcctctctccttgcttctctgttcttcaattcgcgatctcacagaggccggctgtgcacgcccttcctcaccctccttttcccacctctcggccaccggtcggctccgttccgtctgccgtcgagaagggacgggcatgtgcagctcctccctttctctcgcgcgcgcatcttctcttgcttgtggcactcacgctcatgcgtcaaggcggccccacgccgagcccctgcgctcccttccctcttgcgcatccgtagcgcggatgccgtcgatgcgcaaggccggcatgaaggagcgcgtgccctcaagagggcacactatcatgccctacgtgggccacgcagcgatgaggccggcttcggcggagatgcgtcacgcacgtgccagatgatgcgctacgccttccttgacttgcgcccccctctcttcctccgtctctcactctctctctctcacacacacacacacacacacacacacacaa

SEQ ID NO: 121 - DNA, 955 bp, Artificial Sequence
  IrLmA
tgaactgcctgtcgcaacgaccacggccctctcgctttcccttggttggttcgtcaaacggctgaaccggcttctcttcctctgtcgctccttgtcctcatttctgtttcacacgacatacttgtctattatgtcgctgcctgtatgtgtgtgtgtgtgtgctgcaatgacgggtagggggctgaggcggcaaggtaagcaggggcgccgaggcacgggtagaggccaaaggcaggcgtcggcgatgatggaccttcctcgactttcttcgttgtggtcttatctttgctcgtttcaattcttgttttcatttctcgtcgtctgaaaagaaaggcaaaaaaaaacaaagaaggggcgcagaagagcgggatcgcgacgtgcgtacacgtatcgaggtcgcttcccttttttgcgaagtcttttcgacctctcgtacacatctttcgtgggctgttgtgcaccatgttcagcgcgcgacgtcgagctgtgctcgcttcctgcaatgacttcccgcccttcgtctttgtcttccactggaagagtgtggcacttcactcgccagtgatgaggggaagggggagcggaccaacaccgtcttttttatagcgataaggaggtgaggaggtggtctgtgtggcgttcctcgtgatgataggcttcatggtcgacttacttaccgcgtgaggagcagcatatccatccacctccaagttcctcgaagaggtcaggaaacgccacttctcatgccccgccagtctcttgtgtaaccttcgtccctcttattcttcatctcactcatccgtgcctcgttgaccacttcaccgtaacccgctccctccctttcaatctctcctgccccccccccccccacacacacactatcgctcactcgcgcccctttgttcgtgtttccctccctatcatatgcgtgcgcattccataaagtgttgcaatc

SEQ ID NO: 122 - DNA, 346 bp, Artificial Sequence
  IrLmB
cgagcgcgttgcctctgcgctggtgaacgtgcctgcgcacttacatctcagccgtgctttctgggaagaccttctgcgacgcggggcgctgtgctggtacagatggaaagatgtgcgccatcacggatgcatccttgcatggtgcgtgctcacgtgctcaccacagtttgtgtgtgtgtgtgtgtgagtgtgagtgtgagtgagagagagagtgtgtttcggcgcacctcccatccaacagtggcgtgaacggctttctctgtatgcgccctttcgttttaactctttctttttccgcctttgttttttgtgatttttgatgaactcaaacacaaaatgaacatcc

SEQ ID NO: 123 - DNA, 544 bp, Artificial Sequence
  IrLmC
agcggcttgccggatgccgcgtgagtaggagggtggctgccgcaaacgctgacctcggcgactgcggcgtggcgctccccttctcctccttttccggcggtgtgtgtcatgcatctgcgtgactcctccctctcatagatgcaagtttttctttttgacccctccctgtttgacctgcagccacacggatcgctgtgcgacgtggacggtgcgtgctgaccgcagagcaaaacacaagacacattctgcaccgccgttggtgccacctgcggcctgcgacgccgccagtgatgcccatctcgccccgttgccctatacaccctgtgaagagaggcgccgcggtgccgacgccttctagcatctcttcctttcccgtgaccactgcatgcttcctcgctttgccttcctgccacgccggcttcctcaactttcccttccctcgccacctgctttttctcctcatgggttctgcggcagcttcccagcccaccttcgctatccagccactctcgctcttctacatctcccaccccctcacaccgcc

SEQ ID NO: 124 - DNA, 460 bp, Artificial Sequence
  IrLmD
gcggcggtggctgtgccgcggcacccactgccggctcgagcgaatgcctgggcgcgctgtgctgccacggcaggcatgagcgaccacccgcttgtgtgtgcccgcacgcgctgccccctcctccggcaatgtcctttcatctttttcatttgtgatttcccacttccctgacggagaatggccgatcatctgcagtgggcggctccttctgagcgcgcgccgcaaaggggggcggggcggggcgggggggtcgtagggctttcgttgcgggtggcagcaggcgtgagagcgcgcagcgagaaagggagaaagcgcccctgaagccctcacgcgcgttgctcgaccgactagcggccctgtgccgtgctggcggctgggctgcgtaagtggcgcgtcgtgctgcagcgcctccccacccgctgtcgtgcgaggcgtgtaaagcgtcactctccccctcccc

SEQ ID NO: 125 - DNA, 593 bp, Artificial Sequence
  IrLmE
tcagcgttccgtagcgcgctgcacatccggtactgcgttccagcgcatcacgcgacgcacagcaacacaaattttcgttttgtttctcttccattcgaaaaaaaaaagataacacccaccccacttaacctccataacaagagagcgtgagaggagagtctgctcttggccttcacaccgcaaatgcagcaaaacgcggcttgtacgcaacgcatctcttagcacgtcaagctaagcagaatctttgcgtacggcaaccaggctctcatcgacccgtcgttcgctcctcgctcctccggcattcttgagccacgacgcgtatgcttggctccgtgcgtctgcgagcgtttgtgcgtttctcaaatacaagccgaggggccaccacgtttatctttgccgctcgacgcacctccttcaactacatgtacttacgacccctcgatctaaaaacctctgcccatcgcatcacttctcattctgtcgttgtgcctctttctaccttcatctttcgcttgtgctttctttcctaatacccttctcgtgtaatccctcatcacttttcctctacagctcgtttcgttcccttgccgaaa

SEQ ID NO: 126 - DNA, 846 bp, Artificial Sequence
  IrLmF
gcgtgcggtgctccgccgcccgcgccccctccctccacccctttcttttcgcttgtatccctcccccacgcgtcccgcggggcctctcctcttttcccccaaacccacgcacgcccacgcccccctctctctctctttcgatatatatgcgtgtgcgcgtgcgtgtctcgtaaaccaccctgtaaggcgcagagccgaagtatgtgtaagcacaacgcccgtggcgcgcgcggggacgtgcaggcgtgcgtgcggctgtgcgcgtgtctgtgcgtgccccctgcgcgacgccgcggtgcgtggaaggaaaaggtaaagcaatgtcattcccctgagaaaatgaaggtagcgtgactggcccgtgaagcgacccccaggcaagtaagcatgcgcgcgatggtgcccccgaacgcgcgccacttaggactaagcagacggacatgcaggcgcacagccgtgaaaccgagcgactttggcgggcatgggcggggcgggcgctgctgctgcccccctctcctccccccccctccccgcgacccgtccccttgataccgccagcctgcgtgcggctggcgcgtgactgcccatggcgcgcgctgccgtgcaccctctctctctctctcttcccccacccctcgcgctcgcttggccgagctggcggctgctgcggtggccgtcgcgccgcacccctcctctgcaccacctccgccgcactctcctctctctcctctctgtcctctccctcggtctctcctcccaccaccggcacacgccgcccccgcttgcctgcccgccgcgcgcagataaccagctcgctatctaacatcacgctctccgctattcacc

SEQ ID NO: 127 - DNA, 683 bp, Artificial Sequence
  IrLmG
gcagcccctacgatgatgagcgaatacgtggtcgggggaaggcagagggcagtggtgctctgcacgtgcttgggcaccgtgtcttcttagacgagtagacggtgccgggtgggggaaggtggaggggggaagagagtttgggcgatgagggagtcgaggcatagcacacgcttatgtggctgtctgcatgtagggtatgccgatctcggtgagctcagctcttgcaggcgcataccctacattgacccgctgccgcgtgtgtgtgctgtccattctctccaccccacctccactcgtactgttgcctcatctctgagcgggtcgcctgcgctccttcctccgcccctcttcctcgccgtctccatcagtcaagtgcatcgggccgccgcgacgtctggccgctgttcgttggtgcatttccggcagcgacggcgttgcgtcggtgtgtgtgtgtgtttgtgtgtgtctctctctcggacacacggcacgtatgcgagagcgcgatggggaattcgctggacagtgtgtgcgtgcatgcatgcgcactcgagagcctttcgtcccaccaccctccgcgtgcacgcgtatcgatgcctgcgtgcatgcgtgtgtggtgggtggtgggtgggggagggtgttgcttctctcttacaatttttctgttggtttcctcgtttcttctt

SEQ ID NO: 128 - DNA, 635 bp, Artificial Sequence
  IrLmH
gtcctccggcttgacagcgcacacgcgccgctgtatgtgcgcgtgcgcgcgggtcccgactggggccggcgatgaggcgcatcatacctccatagagaccctattttttgttttatggcttctcagatgaccacttggtttcttccttccttcgtttggtttgtttatctcctccccttcgttgagggtacgagtcagggtaggctcggacaaaacttaccgcacccgcgatgggccacagctgtctatcgctctcgctctctcggtctcctgaccgggacaggttgtcgccccgtcacgcgtaccggcgtgcgcgcccgctcttgcgccctgccccaccattcgtcgaatgatgcgcgacgcgcatgacaggcgctgctgcagcactgctccctgcggttgctgagtgcgtacatggcgttgctactgatgtgtttgcactgcatctcacctcgctctcttcacgcatccgctcgcccttcttccctcttcacgagactgcgtcggtcttttggtgctgctgtggcgcagcccgccgccttccactccccccaaacacacacgttcatacgtccacacagcactcgtgcgcaccgacacacccacaccccctcctctctctcctctccccaacc

SEQ ID NO: 129 - DNA, 619 bp, Artificial Sequence
  IrLmI
gcctgtgtgctgcctcctcatttccggcggctcgcacgcgctcgcatgcttcgccacacagacgtcctcgtgtctactgaacagctaacggatttccatgtcatttctcgtttcccatcttcaaacacaagagcaccactgcaacgtcagcagtgaacgcccaacactgcggagagcgtggtcacgccccttctgacttgcaccatgaaaaacgatgtgaggcagcggcgcgtcctctctcccgttcgctgacttgccccacgcgagtatctgcgcgccggcacccctctccgcagctcggtttgcctgcaggtgtgcgctctcgatacctcccgcctctgtcattctgtttgtctcttcctcccagctccactcttcttcttttcctgcttctccgtttgtttgtgcggcgcagtgccgcgaccagcacattttggctctctctccgttgctagcaccaggggtcgggatcgacgtgcgcgttgctcctccgctctccccattttcatctccttattctgctttgttttgcaaactcgccggcgaacgctgtcaaatcttcacgggttgtttttctctcttcctctctcgtggaacgccggcgtgccaagacgaggcc

SEQ ID NO: 130 - DNA, 813 bp, Artificial Sequence
  IrLmJ
ttcctttcacctatacacgtggttcatatattatcggctttttacctgagagagcaaagaaagcttattagcacggaaaaacgtaatgtgctgataggggaaagaaacaaaaacaaccgcagccgagacattttgtttgtgttggaggaagtagaggaggcccatcggtgtctagaagacaataccgcagtgtgagacagtgacagaggtggcagaggagaggtagggggaagctcaaatgagtgctgtatcatgtatgcatgtctctctggctgcttctcagcttttcgttccggcttccactggactgtggccctgctccaaaccttcgacgtgggatgattcgatgactctttcttttatcagtgactgataccgatactgtgctgcagagaatcgagaaaaaaagcggaaaaggcggcagggcctcgatggcaaatcgtttagttgtgtgtgtcagtgatgcctctctaggtggcggagtggggctgcacgtgatggacgacgacgtagcgcaatacgcgccttcagtcgacagatcgaacaagcaccgtgctggtttcagtatccctgcgcactctcctggttatgggcgccttgaatgcgagcctttgtttgagctccacttgctgctcatcaaatggccacacttccgacctcccttgctctttttttttgcacttttgtggcacctgtgtccttgctgtcggtcctttccaacttcagcacacggagaaaccaccctgactgtagcaatcacgatccagtggggacaaaggagacgaggtgtcgagtgccatttcgacgatcgga

SEQ ID NO: 131 - DNA, 919 bp, Artificial Sequence
  IrLmK
ggtagactcgtgccgcgcgctgatgatgtaggtgcacgcgtgcgtgtgctgcagcggagccgccgccaccgcgactgtgtgtgtgtgcgcgcgtgacgaccggctcgaggaaggaggagcgcgcgtgtgcgtgcgatgcgcctcctctttttttttcgccctcgtcggtttttttttttctgagaggacggcggcggcggatggcggggcggcggcgctgacggagcggccacgctctgcacctccccgccctccgccgtctctccgttcgccgtcctctccttcctcgtgcgtgcgtctgccgcgcatgcacacgcgcgcgcgttgccgtagcgctgtgtatctgtggaggagggccttgtctctccctccccgtcgctgagagatgaaggggcaaaaagagagagcagtgcgcatgtgtgcctccgctccctggagctccccacgagccccctgcgccacgcacctgcgaacctgcacagcggcccacctgcccgcacacgtgagcagaaatgggtgtgtggagcgggtgatgtcggcgcgcacacgcgcgcgcgctgaccactccgacgtgaaaacacggaagagcgaggctggcaaggcagggcaggaacctgatcacgtgcgcgcgcacaaacggaatgagcagctcctgaagaggagatggggctcatgcacgcagacacgcacgtgcacactcctccgtcttcacggagcgcggccctgctgctgctgccatgtgccggacgtctgccacgcgtctcttccccacaccttgctcttcccccccccccttccctcccggcgaacacaaaacacgcgcacgcccaccgaaacaacaacgcgcagctcttcgctctcgttcttcgaacaaacacctttaaaccgccttccaacccctctttcttctttttcagcc

SEQ ID NO: 132 - DNA, 500 bp, Artificial Sequence
  IrLmK2
gtgcctccgctccctggagctccccacgagccccctgcgccacgcacctgcgaacctgcacagcggcccacctgcccgcacacgtgagcagaaatgggtgtgtggagcgggtgatgtcggcgcgcacacgcgcgcgcgctgaccactccgacgtgaaaacacggaagagcgaggctggcaaggcagggcaggaacctgatcacgtgcgcgcgcacaaacggaatgagcagctcctgaagaggagatggggctcatgcacgcagacacgcacgtgcacactcctccgtcttcacggagcgcggccctgctgctgctgccatgtgccggacgtctgccacgcgtctcttccccacaccttgctcttcccccccccccttccctcccggcgaacacaaaacacgcgcacgcccaccgaaacaacaacgcgcagctcttcgctctcgttcttcgaacaaacacctttaaaccgccttccaacccctctttcttctttttcagcc

SEQ ID NO: 133 - DNA, 945 bp, Artificial Sequence
  IrLmL
tcgtgcgcgtctgtcctcagcgtctcggcgttatgcgtgtgttcggtttcgttttgaatccgtttctctttctctcttttctgtcgttttacgcttgttttgtttgggtttcagcgaggatgtgctctacaggggtgacacccctgcggtgtgtgtgtgtgtgtgtacgcttatgcgaggcgtgcaccttgttcagtgagcgtctcttacgatgtgtcctcccatttgcccatgccgcacagagagacacgcctacacgggtccctcatgaagcttctgtaggcacaacgtgcgctgttattatgctcttcccttccctaaagaaatattacaggtctgacacccgccaaggcggagggcgggcgagagggaccgcaggtcagcgcgagcgcttgcccagccttccatcctccctcccccattttccctggtcgcttcaccgagaggagcggatgcgcgcagcaagggcagcgaccagcgaggtcggggaccaagaagagcgcgatggcgctttcgttggcggttgcgtccgtgtcgagggcggatgagacgaacctccttctcttttgctcaggcaggaagagcctcagtgaacgaagaagcctttcgggccgcgtagccgcttccgcgagctgttcgagctccgctggtgtgtgctatgaagacgtgccgcttaacctgcagagcccgtcttccactgcgtcgccattggcaatgattgttcgtccctcccgctctacacttatccccggtcaccgttttccccttaacccttcttgtacgtgccgctggcttcattgctccctctcttggtggctcgatgtgcacgcctttggcgttggcgtgctcaaacacatgcgcacgtacacatacaccctctctttccccacatgcacgaaacaactcttttcccccagcagcattgtgtgtgtgtgtgattcaatc

SEQ ID NO: 134 - DNA, 684 bp, Artificial Sequence
  IrLmM
atgctcctggctgccggttgcaagcacgtgtttcttccatcttgccatgcgaagcccgcgcggtatcttctcagcgtgccctgtgtgtcgtgttcgtaagttttgttttccttttcgatggttctcatttccttctttctaacgacgctctaccaaacctgtacacgtactgcaagcgctatcgtggaggcagcaggggcaggtgagagggagccgcggacggcgtcggcggaagcgttaatcctgcttccgtactcgtcgggctcatcatcgtcgcgtatcccgatgagtcgtcccaaactcccgctctgtgccagagagtggactgccctgcgcaccggtgcatcggtgctctgcgcggcattggcattcttgattcgtgtggcggtgcttgtcgaccacgctctccgcacctctatcctctccttggcgctctcccgatgtggcgcgagccggcaggtctcaagaggcgcatgtgaatgtttgcctgcagggagtacactaaattacttttctctgtctctctctttctctgactccctttggcctcccttttcgaaactccccatgctgccattgcggcgaccctccttgtgggatgtaccgacaccacaaccacacgacactgcatcctccctcgtctactcctacctcctcactgatgcgtgtgcagttaactggaaa

SEQ ID NO: 135 - DNA, 854 bp, Artificial Sequence
  IrLmN
gggaaggataatgtgaacggacaacttctctgtcctttttcgttttaatttgtgattgtttcccgaagaagaaaagcaacaaaaccgaaaggggaaggagcgatgtgcgctcggcagaatagcctgtgcaaagttggcggcagcgcacgtgcgcacctggagatggcaacagcggcggcagtatgcacgcatgcacacacctggcagcgccagagatggaaagggacgaggatagagagggtaaagtgtcggaggagaacaagcacataaagggaggggcgaggtcgtgacggcgcgcgtgcttgttttgcccccccccctttcctgtggttttgctccgacctctctcttcctgtgtgttcccaccctctctctggatgcatatctgcgcgtgttttgcataggcacacacgcgacccgcgctgttgctgtccgctgccatcatgtcacctcccgccttttctctcctctgcacccgctgtgctcgacaatcgcagtggaaaaaaaggcgtgtgctccttttacatgcttcatgcccgacccctctccgtggcgtgtttacacttcaacgctacctcttgctcctcccccacccccgcctttgcgtgatctgccagagtcggcagtacaccaccctctcgctctcgtcctcccttgctgctcaacatccgcgcggagacacgcacccacacaggcacaccagacgccaagaaggtgagagggcgagtgagaatcagcaggggaaacctcttgccgcggtgtgcgtccgtctgtctgtctgctccttgcctctctcgacgattggcgtttgtttgctctcttagtgcatatacgatgctttacaggttttccaa

SEQ ID NO: 136 - DNA, 841 bp, Artificial Sequence
  IrLmO
tcgtgcgcgtcttttcacaggcacctgcagtgatctccgctgacgctgcagttatttgctcgatctttttcgtttcggttacgtttggttttgtcatttttgaaaaaaaaagcgaacaccggcaaactaacagcgacacacccacacacatcaaaaaatcgcgaagggacgaaggcgacgcctcctgcgcggcgccccactgctccgatgggactctctcttcttcgcacaggccacatgtccgagtgctgcgtaaagccccgtggcgcgttacgcgagtgacaagagccgaggcggagaagggtgctgcggactgcactgtagatgctgtcagcgaagatgaaggggatgccgttgtgccagcgcaggtgtttcgggcgtcgttagccactcgccgccatgctgctctttgcgcgttggcccagggaggaagaagaattcaagccgcacgtacaaagcggtggtgcctccgtcctaaggcaccgagttgcgggctgtgtccgtctctctctccctcccttcctctccgttttttcctattcccgcatgccttttcatgtcgaatacgcctttttcttgtgttgctatcctccattacactcacttccccaccatacggtatgtgtctcttctcttgatactcggatgcggacgcgcgtgccgtcctcaatggccgtgtgtgcatctgctttccttctctgcccctcattggacacctgcacttgttggaccctcgtgctttctagtgcacttttccaggagcgtgtaccgttttagccttgctgctatcccacgttcgagtcggcaccgttcctgctagttcgaggacacccttgcccac

SEQ ID NO: 137 - DNA, 940 bp, Artificial Sequence
  IrLmP
cggtgattgcggacacgctttgaggacgtagctgtacccccaatgaattcttctctgaaaaccacatcataagcctcttaagaggttatttttcttgatcgatgcccggtggtgaccagcaccattcctttatcggattcactcacactcctagcgaatcatgtagtgcggtgagagtgggctctggaggagactgttgtgtagccatggcttcaggagagaaaacaaaatacaaggaaaggcaatatgtaactatggggttcccttttttactatgcaaagtttttataactcctgatcggcaaaaacaacaacaaccgccatacaccaagagcaaatgctttcttctgcggactgtgcttctgtttttttttatgaaggagtgactcgcgcgatgaaaagtgtgtgcgtgggagatgtatttcctttttttgttcatagtggcgacagctcactgttgacgatgacagcacataaacagatgctcatggaaagtggcattcattccttgcctgcttccatggtgtttctatgcttttttcttggggtgttggactcctcgaaggtccggtttcatggtgcactggtgaggcggtgccttgtagtctgcgctctgcttttctctctcctttctcactcgagtaactgagatgaaaggcccttcaaagggcaaggggacagtgactgggtctcttgttggatgctttggcgcagaaaaaaaaatcctccctcccgctgtagctggatgatccaaggtgctcgggacagggtcaagcatacgccatctctcaccaaggtaccgcagaccaccaccgctcacagatcgactcaagtcgcacacacaaatacacatactgcccaccaaggagtttaaccacagaaaagccggttagaggacacaaagaagcagaacacgcatacacacacatagagatacaag

SEQ ID NO: 138 - DNA, 598 bp, Artificial Sequence
  IrLmQ
aaccctttttcgcgtcatggtcgagatggctggcacggctgcgcgtctcttttctgtgaatcgagggcattgaacagaggggtctctcatttcctttttcccttgcaagcgcatcctatgcagtgccattttcgtgttgacggaggctctctcgggcgggtgccccgactttcgagttcggatgtaaagggctcagacgtgcctcttatctcacgcagtggcgacagccaacaggcagtcgagtaagtgggaagatgcgggtgcgcgcggcgtaacttctctttatctttgtggacattccaaaggacgctgcacggttaccttggagggcgtcgtgccctactcggcatacttctcatctcgccgttctcctgccttccctcccttcacaaacatcaaaagagaagtaatgcgtatgcgacagaagcgaagcgcacaacatgtatggaggactcgtatcccggatgcatacatatgtatacatgtatgtctacatatgcgcacatggggacacattgatcgctcctgacatgggcgacgaggcacttcatctgcgcactactgggtaggttgcatcgtgttctgtcaagcagcatct

SEQ ID NO: 139 - DNA, 729 bp, Artificial Sequence
  IrLmR
gacgtgcacgcagtcctgtccccacccccgacagcaggagtgcgggactgggtgctctaacaagcgcatggtacgagctatgtgctggtgtgtagccagcggggctgtcatgccatgtcgatctctccccgtgagcagccccccaaaaagacaacctgatttctccctttttccgatatttctccctttgtgctaaggggacccttcagcagctcccagcgccgcacatgcacacactggcgcgtgcttccgaggtcctcggtgcacatattttctattatctcacacacccggttgcagggcggctcaatgtcacggcgcgcgcacgcactgccttgagtacggaacggcgagcgatacgaccgagacggcgctgccagtagggtgtaggacgctgcgcatctcatgaatgtatgaagcatgcagccaaccacacaaacatatgggcgcacgagtcttccctcacagacagcgcggctggtgaggcggcagaaggtcggccgcggaagggcacacactacgtttcacgcgtacatgaccccgtccgctttccgcgctattttaggcgcacacccgttcaccagcctctccgatcctgcttccactcctcctccgcctccgccctccctctccccgtcatgacgccgcacgcaccgcgatcgcacacaagctctctctctctctcaacacaaccgaaccaacatccctcaccccctctcttaccacaaa

SEQ ID NO: 140 - DNA, 977 bp, Artificial Sequence
  IrLmS
gctgcccctcctctccgcgtgcagtggcgatgcgcttgcgcttttgtcgttgacgtgccacagccggcgcgtgtgcagcgcgtccccccggtatgctctgcctgttctccacccacacccccgcctctaccccgtgcgtgcgtgcgtgcgtgcggtcgccctccacctgtggcgcggcagctgaacggaaggcaaacaacagcgaagagaaaagtaacaagtacagtcaaatgaagaaaaaaaaagaaagccaaatgctggcgcggtgtggtgggactggtgtgcgtgctctgtctgtgctgatgggcgccagggagactgctcccctgtccccccgccccgccggggcagctcccattatctttaggcagttcccagtggaccggcgacggtaagccgccatctcttttcctgtgacctcagttataagcctgtaagcctgatgtacgcataaaccaaactcccgcgcacaagcacacagccgactttcgtagtgtcatctgcagaggtgtcggtgactgtgtgcgtgcgcgctgctgcggcgtcggttccgaggcgcgtgcggctgccttctccccgcaacctgctgctgcggtagggcgcttgatggcgccgtgccgtgagcccgcggttttcgcgctgtcgcgcgcgtggaggaccgctcccccttcttcgcttgcctccgcgtggctgcctcctgtctctgtgcctcacttgcgcctccgcctccctctccttcgtctttgcctctctcccgccccgcggcctgccccggcgttgcgtgcgcaccactgacgtgtgcgcgtgctgctcgccctctctctctgtgcgtgtgcctgtgcgtggtgcgaccccgccgcgcgccgcacccccattctccctattcctcccacacttttctgtacccctgctcctcatgccccgacgacgtgtgcgccgcgtgcagtaagcgcaatcgagtttcaacagctaacaaa

SEQ ID NO: 141 - DNA, 690 bp, Artificial Sequence
  IrLmT
ccagcgcggccttcgcgcttcccatcctctctgttcgtctttctttcaccccttccccccagtgactttgcttggaaaaccggagcgtcgctgccgtcctcatgtgtgatgtttttctcggctcatcccattccgcgtgcgtgcgcgtgtggcgcctcccctcagcccatacgcgagctggttcctgggcagcggtctacgcgggcactccacacacgcacacgcgcacccccgccccaccgccgcgtgaaacctgtgtatcacccatgtgcgcacgccctctctctctttccgttcgtcctcttcttttgctgcgggggtcgtgctgtcgccgcgcatacagccggcagcgcacaccgccctcccttcatgtgtacagcccactcgcagtcctatctgcccctcccccccccacacgcacaagcacgcataccctgaccgccaacgtcacccagctgcgctgcagacgccgttgcgtcacgcccgccattcgcaccagccgccccccccccgcggtagccccgccggccgctcttccagcggcgcaccgcccctgcatctgcctcctattgcacgacctctctcccctgccactcctcgtcctccctccctccctccctccccctctgcgccgcaccgctgcacgcagcagcccatttgccctcgcaccgcaccccctccagcccacca

SEQ ID NO: 142 - DNA, 783 bp, Artificial Sequence
  IrLmU
catgcttggttcacagtcgtcttccgttgaaaatgaagacaatgtctcttgcttccttccttgtaggtcctcgcatcaattttttcttccttttcagttacaggcgacatacgattagctaccctctgtttgaggcgacagaattctcaacgtgtttcatgaccgacaaacgcgtgcttctatcgtctgtatatgtaaatcgattttcggtatgctatacgagaacacttgacttttctactctgtcagcggcggtgtgcctaccaaaagaaaaacagaaaccaatcgaatctgctctgctgctcgggctctttcacatgttctgctaagatgcatggttgacctgcgatctggcgaaaggtgcagctgacaagcgctgctcgggcagcataccaacttttccaacgatttaaaatgctttctcgtttttctctttgcgcaaacaactggagcagtgcctcacgggctccttgcagccaagagtcatatgtgtctgcagtttgtgccgctgctgttgccaccctcatcttcccactcctcgtcgtgctttacgacttgcagcagcgaggcgcccttttttatagatacatagagaagccgcaacaccacccatacagttcacttagcagccctgtcggagagtacaatagactggctattcgtgcaggccgaagagctgcatcagaacgcggttagacaccgtcaaactgtgtttcctccgcttccctgtcgttttctcattgattgctttcctcttgcattcttacaacatcggcagccgat

SEQ ID NO: 143 - DNA, 571 bp, Artificial Sequence
  IrLmV
tatggtcgtgtgtgaaatatttctagagagctaacagaactcgttctctccgcctgtttcttttcgccccctttttcacttccatacacaaacgccttcgtttcattcgttacttttcatgtaattgcaagtgattttatcagtgcggcctcttctttgaggctgaaggtgtgaatactttgatctattcaaacacagctctattgctggtgattgtgttcttaccttattatcaaaaaccgaaaactgttctcttccatctatcaccattgaccaagctcttgcttctcactagtgtccactcagcggtcacagctcgattttcatctcgccgcgcgtctcttttctcatggctgtcacacagtgcgcactgagagacttgcgctatcgtgcgcgttctcttcccagtcctcaggtggaaaagcagcaagtttcctgcatcgcagcccaacgtacttgcgctcgccctacaacagcgtcttctttcactttgtctacttcatactttctttgcctcactttccctcacgtggttgacagaaactcattgaaagcgaagcagccccaagtg

SEQ ID NO: 144 - DNA, 537 bp, Artificial Sequence
  IrLmW
gtggtggaggcaaactatttgttgttaaaccagcactatattctcgtgtccaatcggtagtgcagtcatcgagtgaacgctgttcttagcaccttgattccaaaggggaatagtacataagatatgtgtcatgaggcgtgtacacaattatttctcttaggatttttttttagttgaaataggtccttgttgtgtcaccattagcgttgtccgagtgaggtcagcagaggtaccgtgcgcgcgtgaaagcacttgctgcccctgctctttggcgttggtgtaatgcactcagatatcgtctcactttttcttctttattgcccaaggtgggcagtgaggagacgatagtgagcacctatttcggacatgacgttcttctgtgtgccctcatctggagcacgaggcgctttcttgtgtctattatttttctacttgttccctgataagcaatgataccactgcctccgtgttgaaacacactggatcgcttgtagcctcactgagagtaaacttcttcatcagaaaacagacaggaat

SEQ ID NO: 145 - DNA, 920 bp, Artificial Sequence
  IrLmY
tgccccgccgccgttgccgccacaccgccgtggccaataccaaagcgtgcatatttcgggcgcgtctgcatttttagtcccccttcttaggccttgtattgttcacttcatcttcccttctgtaggacgtctctctgttccatttcttttcttgtatgcgccccctcactaccgcctcccacgctctctctctctcgctctgtgtgtatgtgtgtgtgtgtgtgtgcacactttcgcgtcttcgacttgtccctttgtttttctcactctctctgccccctccccacctcaccgcctgtctatgcgcttccctccctgttgttctgtatgcgtaggtgtatacgtggtacacctcgagtgccacggcgtggcgcacatagcagcgttttcgttttttcgcttggtagaagatgcgcaaacggcgttcacgaccactgaaacagcgcgacatcggcgcgcacgcagtcccctttgccaatagcgaaatccggcacccgcacgtcagttctggctctctttcctcctcttcccatgacccgatggtggagctgcaaccagcttctcttttcgccttctgggaggcgggggtcatgcctactccctcagtcttcatgctttatccttcattgcctacccctttgtttgctgccgtctacctcactttcttccgacacacacacacacacacatacacacacacatacacacacacatacacacacacatacacgtgccgttcatctcttcttgcacctcacaatctgcgccttcttctttcagctgttcactgaactagaagcatctggcgaataccctcccccctcaacatacacaccgtaccacccccttctctccccctccacctccaaaaaaaaaatatatatttctcctctgtgccttcgcccatctcatcatttatc

SEQ ID NO: 146 - DNA, 540 bp, Artificial Sequence
  IrLmZ
ctgcgttacgcgcacactcgcatgggatagaggagaggagtgtttcgaatgtaaatagtttctccccaggaatgtgtctaagcgcgaacaaataatacgaacagtgaacacgccgcagccttgctgtgcattcagactgcctttgacaaagagacatacgcatagccacgcaaagatgccgttgacccaccgtcttgctctcgtgttgcgcaacatgtccttccgtcattttttcacctgtgtccatgtcaacttcccttcctaccattgatgccgagtcatcatctccgcggctttggttatgcgcacttttccgaaacgccggctactctcagcttttccctccgcttttcacctctattgacttacataccctaagctgcaggtgctgaagcttcccagcttgtggttgcaaaagtagcagctgctggttcaaacacgcatctacgaaagcaaatagaaaaaaacgccggaaactccgtgcacacgcaaacacgcgtacgggcacagcgcagacaaggaacacggaacaacatcaca

SEQ ID NO: 147 - DNA, 666 bp, Artificial Sequence
  IrLmAA
tggactctaacggatcaggtttgcctacccctttcctctctgcactcttcctgtctctgaagggagggcaagggtgtgcatggtgccatcctctctctccttttttgtgtttgccagctttttgtgtgtggatttggatggtagagggtccccttcgtctgtgtacagtggccttgcgtgtgtgacgaggaggaagagcggagagcgaaagaaaaccatcacaatacgagagcgagtcaaggaggtgaagttgcgttgtttaccttttcatgacctctgggttttgcatttgaacgcaacgcaatactgaagaagacaaaaaaaaactattgaactgtaggcagaaaggaaattgttagactcgggagatcggccggtatgacgcactatgaacggctttggtctctcttggggaggactcttggcataatgtgcgcacgctttagagacgccgcataggtgttttgggggcactgcacgtgcgaaggtcggtctccgtgctgcattggtgtcgcacacttttgtgcgacacggcgtgttgcggacgctgtcatgcgtacttgtaaatagaaaaaaatgcacactgcgcctcctcttacaggccgcatctatgcagcatatgcgggactcatctgatgaatcccgcgcacttttccacaaacttca

SEQ ID NO: 148 - DNA, 950 bp, Artificial Sequence
  IrLmAB
tcgcgcggcttcacaaagagaatggatgcggctttgacgcacatcgaccagctgtgctttcttttaccccctacatcctgttgcgcttgttcactgacccctgcacgcttccgcgtgcccagcagcgcaccacagaaggtcaccgctcgatctgcgcagttggagcaatagtagcgcagcggagagcatcaagtaggtagcactgtgtcacctgctgccgcgacatgtgcgccgccttctcgatctcccacggcacgcgcacctcccttcttaacggcaccgctgtatgtgtgagtgcacgcatcgggtgcgcgttcattcgcttcccttcacttccccagccgctgcggccttgttgccgcacgctttttccacacgctgtttacttggttttataggatagcacttactcccaccacccgtcacaagcttctcacccacactcacacccccacacccgccaacttagcagtggcgcgatgagggacgagcaaaccaaagacagggcagacaaagtacgcgagactgtctctcttttacctcctgccttctttcgctgtcgctgccccgcgattattgaaggtgattcacaggtgtcagtgggtgcagtgggccctccgagcaggcgtgcacacttgtgcacgacactcaacctcgctgcgctctcttgcacatgggctcacctttttgtttcattccttctccattccttcaccctttgcatgggtggtcacagcatgtgctcagagaggtcgatgacgcttcagcaacggagcacctactcatggcgctctcgtcgaccgcgcccctccttgtgcctccgatggggcagcatccgctacactttcccccttttccattctactcgtccttttccttgtttgtgcccgaaacataaatcacttctcaaccccttttcggcccttcactactcgcagtctttccacttt

SEQ ID NO: 149 - DNA, 809 bp, Artificial Sequence
  IrLmAC
aacagcgcgcgaggcagcagagacgtaaaagttgaccgagaagggcgtaacgagagagatgtaagagatatgggctacagcagtggatggcacacacacagacacacgcgaacacgcagcgatggtgttgcacctcttgcttctactttgcggcctttcctgtgataaacaagtgcacctgtattcttgttgtatgtacacatgggtgtatgggtgtgcattgtgcatctctccctccttccttctccctcgctctctgtcctctttgctatttttttttctttggcttgctctccgttgacttgagcacccgtggaaagtcgagccgaccacaagacacgcgacacggagcaaggcagccccctggcgaacgattcacgttcgatgtgtatttcctcttgtgcctccctttttgtgaagcagccaagcgtttgcgcgcatgggatggcgcctaagcgaccgcaaatgatcactctcacaacacatgctctcacctcttctcaccccaacgctggtctttgcctctcatgcacacgcacacacacgcacacacatctgcaggttggaagaatcaccgcaagcatcctcactactactagtcttttgtcttttaagccttcttctcttcaacccaattgccactccaccgcccgccctcgctacctcacccccagaactgtgtcgccgctcaactccccgacataacgcaggcacatacgccctcctctccatccccgctctgcaccccaccccacccctctcgctctttgcctgctctgtcagcaacgggaaagctgagcagactcaag

SEQ ID NO: 150 - DNA, 448 bp, Artificial Sequence
  IrLmAD
gcgcgatttttttataggccacatgcgctcagtgctttttgtgctttcgaattctcggcttgctatggtagtctactggaaaaaaacgcaaagctttgcaaagaaaaaaatattgctattgggcaggctctcgacggctagtttttttttttagtcttgcggatatggattggtgacgctttatagccgtttgcaccatctacatcagaactgaaatgcatggtggcgatgtcgaagacggccagcatttgctgtgggttcgctttgtactgaaatcctcagtgtaaccaaaacaacgaaagaaaaagcggatatataaatgcatcaatatgctcagcatctttctcatttcttttcccctttttgagctcccttcattttatgctgctcttgtgtattccttctgctttatgcttacgatttagactgcagaacagtacaagccagt

SEQ ID NO: 151 - DNA, 391 bp, Artificial Sequence
  IrLmAE
cgtcgttgctcggtggtcttcaccaacgcccaaaacggctcttcgttcatgaggtcatagatttcaaccttcgcccttttcttctgtataaagatctgtaaggtaagtcgaaaaaaatcaaaacacctctgtgtgtgcgtgtgtgtatatgcatgtgtcagcacctgatcagcattgtgtgtcaaccagagcagtagtagcggctgttggccgagcggatttggtgctcggagcgccaaattgattgaacagctctttcagtggcacggtccgcctaccccaatgcataacgtatccgcaatgcacgtctgctgaaatacttccacactctcgttctctctttttcttctttctttcccaagctagttctccttgcgtccccagatcgagg

SEQ ID NO: 152 - DNA, 735 bp, Artificial Sequence
  IrLmAF
tgtgccggccaggaggcccactgcgcgcatgcggccgcctggtgtgcgtgatgcgcatcatactctcattctgcctgtgacgaactcgagtgtttggttttgtatctcttcttgtgcatttttcccccacccccgtttctcttgaaaggacgcgctgtcctcctgcttggcgtgcctgttgtgggcagcggaagccttgctggcggcccagttgcactaccgctgttgtaccggtgtatggcaacgcgtacgtgcaccgtgctacccgtgcggcacacgccgtccctccctccatgtgtacagcccctctttcgtcatcatgtgttgaagaagcgaccacacgaagaaagctgatgagccgctcgccgcccacagtcaaggagagcggtgcttcgtgatgcgcagtgctgtggcatacattgtcagcaatgagtgtgcttttcggtgctggaggtatccgtgaggccctgtcctgctgccctgtgtttcaggcttcccctccccccacccacccgtccacctggataatcgtcccctgctgctgtgtggctgttttcctgccggtgcaccattcttgttcttcaatattcgctcttctcctgtcctctcacccaccttcacgcagtcgaggacatccttttctctttcccgcttgccaccagcgccacctcttctgggcatagcttccgtgcactcgtctcctcccctccgcatgcactgcgctcgtgtttggaa

SEQ ID NO: 153 - DNA, 752 bp, Artificial Sequence
  IrLmAG
cgcagtttgctttttagcgttactttgtttcctaatatgggcttgtgtatggcttttccccttctgttcttgttggcattttactgtgtgctctgcgtaaaatgattgtttttgctctccatcgagatacgtggttgattcacgtcatctgttttatgtgctttgaaagtgtacgaaacgaaaagcagagggggaaaggaggggattataaatgtgtttgcgacctctgttattgccacttttttttacgattgaattctcattttacacacacacacacacacacacacacacacacacacacacacacgaaaaaaaaaaacaaagattgacgacttgtccttatcagcattttttttcgctgtcgtgacaaaaaaaaagtgtctctacaaagctgtgatagtgtataaaatagcctagggcttgctgccgtcacgaacaccccccttataggtttcgtacagctgtgtcatttggcataaacgcctgctctcttaaagcgatttccaggctcgacaaatacattttttgctctagagtattttcattacctctctgcttcctccacttctctctcgaatacctaaccttgcaactgatgatatatatatatatatatatatatatatactttttgaaagcacatccctttgcatattattatttaccgcacagtacaatattcaacttacacctctcaaaacacgacacctttcaatctagttttgtactaatctgcagactgagaaaaa

SEQ ID NO: 154 - DNA, 319 bp, Artificial Sequence
  IrLmAH
aacgtgctttccgagatagcatttccgcagctacttttggatgcacaaaaatgttttcacccctttttttagccctcgtaatgatgccacctttccaatgctacaagataacagttgagttttagaatcaacgaagttctagagctatcgctcagaagtacggcggcgagccacctgtgttgatgcagtccgcggatcagagcagcatggctgccgatgaagcaccgctcactcttgccttccttcacgtatactgtccctctgctttgccgccttttttttgttttcaaaaaaaactctacagttgctcatcctcatc

SEQ ID NO: 155 - DNA, 925 bp, Artificial Sequence
  IrLmAI
ttggccgcaaatgctaccaaatcgtcgacttagtcttcttgactctctgacacattcatctttatgtagtgttgacaaattgctaggtcccggggttgagtttagtgaattatttcctctctttggcgagaacatactggctgcctgcgaaggtgtcaacttctgtttacttgtggcaagggtcgacagcttccaaagcggtagataccgttggaatgttgctactgcagcccttttcagtcgtctccctctctttctcttctgcgattcgggctcgctttcagttgagaaaactgagggattgacggaaaatgtgtatgcagtgaaaggctttccttttcacgttcggaaaagctgttgaggaattttccctgtctttttttttttctcttgtcgttgttctttggtcgtttcggcgagtttcctttgcttctctccaaaaagaaacttccagattcacgcgttgaggatcggcagccactgtcatgacactacagattcgtatccaaagataactcaagtaagcgtgtcgagtgcagtggaggggatcgctgcactgtcaccatgttttcgagtccaaaggcctcgattttacgccacaggggagtttccagtatagtgagaggtgcttcttttctatgggacaacctttttgtctgcatgaggcaacagccactggtgaactataagttacaggcgcagcatttccctactcgtcttgagcggttcgcacgccgtcgttcgagcgtgctgttcgtggcttactattttgcgctcgcctactttctccactcgtctctatgcttctttgcaacgaaatgcacttttgcgaatttaacaaatgcccccacacaatgctcacatgtaacgacctcaaacttaacactgccaatcccacaatcacagttcctagaagtttgacaag

SEQ ID NO: 156 - DNA, 694 bp, Artificial Sequence
  IrLmAJ
tggccactgcctggaagtaggccacacaaatgcacaggcattcattagtgagcgtgcaagagcagacgaccgccttcaacagcgcttcgccctcacgcatgcagaagcgttgctttttttgtctactcagcttccttcttcccagctcactcggtcgcgttggctggggtcttcaaagaagagggccaaacaccaaacaagaacgagccagcgccactcagctacgggctaaagcacatgcggacacgctcacaggcgcgttcgctgcgcagaagcacagctgagctgcaaagatatagatgcgcccccgcgaggcggcagtgagagcggttctccttcattgactgacacgtgaagctggccccatccacccctgcccacgcagcccgtcgaaagggggacaccggcgcatgatagggtaaggcgagcgtgcgtgtgtatgtgcgtctgatcgctccctcacgggctcatgctgcatcttcctcggcgtcctctgcacgcccgctctctgcgtctcactctcttccacctgatgtatttacctctccgtatctctccgtgttcatttctacgttctcgccttcgcgcccaacgtcacacctgctgtcttttgtttcttgcacacacgcggcgtcccttccgcactacccacagtcccagcgctttccactcaccccaccacctcacctctaca

SEQ ID NO: 157 - DNA, 583 bp, Artificial Sequence
  IrLmAK
ggccgagactaaaaacgcgaggcagcggcctctcttcctttttttctatatctccctgcgtctctattgcatctttgttgcttgtttccactgttctcgttcagttttcttttctttcttgttgtgctgctacaaggtggacgtcctgtagttctctgcttttcgctttcccgtcatctttttccactgaaaacacccttttagcatgtcgctggtcttctgattcgaaaaaaaaaaatacagcacggcaaaagcaaaatgccgccgacatcttgagcaaaagagacaccttgctgctctctccccttgtcacctctttgggctccaagtgacttgcatcgggtcgctcatggagtgcatccgacgtcgagaaccccgcgcgtactctactgtctgcatgcacagccttgcgtcgcagccgatcgcggtcagcaaacagtggcactttcttatccgtgagcactgatgcctcctacctctttcttcagaaaacaatcctcctgtcgctcgctttgcagcgtgttctgtatctcctgtacatgaaaatggcacgagaaaggctgtagaagaaaatgtcgtgaag

SEQ ID NO: 158 - DNA, 873 bp, Artificial Sequence
  IrLmAL
tgcactaaacgcatgtcatccctatttatttgacacactgtgctaagcaatttggagtgtgtgtgtgatagggaatgtctgtcggtttatcgcactcacagcttgtgtcgccgcttttctttcttttttgttgttgttttctagcggatgtgcctggaaaacaaatacagcaagggcaagttttgctccttgtaatacatggttgttgacagtggcaaaagcaaaaagctgtgaaaccgttgacaatggaaaaaaagaactgaagcagcgcgcctggcaagcgtcttcgtttctttccctatcacgctcttcgttcccatacgagggatgttagtgggaaccacaacacaggtaaagggtagcatgttatctgtttgtttggtgttgctaccagtttaaggcgcgttaacatcgttgcttttgtcgttgttaatctacaaaaaatatatatatatataagcatttcactaacgtggtaaaggaaacaacaaaataatgtttgaaaaagtaaacagggctacgagcatctggtcaactgtgctggcattcaactcctttccttacagctccagtggtgaaaccatcagcgtattcggttaacgactctcgcaggctgtcatgcatactcagcagcgctgcacagtatttgctctcgcatatattgtcacgcccgtacctcgttccggcacaagcaattcagaaaaagatgcgctcccttttgcaaaatccagtgctttcacttttactctaacgttcctctcgctttttccctaaaggagaaactgctctttgctgtagcccgtgtacttttcttttccatattgaataccagctctgtggtgtcagtcagcgaaagaaagctttgcgttttca

SEQ ID NO: 159 - DNA, 788 bp, Artificial Sequence
  IrLmAM
gacttaatggggatagtgaaaggtgccaaaaaccaaggcgtggcgtgtgtgagtgtgagagcgagaggtgcacgcgcaaggactctgtgagcatcctatgtccgggcgtaggtgtcggtgaacagctgttctctaccatccccctccccctcattcgtctactggatcgactccgcttgggtggagtgcgtgcatgtatgtacgtaggtatatggtatatacatatatataccatatatatatatatatcgatatgtgtgtgtgtgtgtgtgtagagggctttttcttctgtgctgattcttcctcaactcagcgatcaacgcgtgatgtgcccgtgatcgggatgggataagacaacccgtgcacgtagaaacgaagagaagcgcacataagcagtgtgggcagcagacatgaatacatatacatatatatatatatatatgtgtgtgtgtgcgtctgttttgcttcccggtgtcgctgctttggttggctcccttcacctcacctggcccgctgactcctccgtgtttctagtgctgcctgtacctcgctgcgctcgcctcccttcacctctttcgcctcggccctctcccccaaaacacaagagcacaccataagcatccacacctctcaccctttcaccaatcaccgtctcttccccctccctccctgctcgctcaccgagccccacaatctccctattcccctcattaagaccacgcacacgcagcagcaagcggtgcccgtcgtcatagccaagatccattctcgctccgtacgaatcatcc

SEQ ID NO: 160 - DNA, 621 bp, Artificial Sequence
  IrLmAN
ctgtaatagaaagcttctcttgcttctaccatctcgaggcaccccttctcctcgctcaaagcgggaggcactctgcggctgcttcgtgtcttccacgaagagcagaaagcttggcgttcctcgcctattgctgctcgtgaaaagcggatgctgaaaagtcgtgctgtttcgggcacgacagcacgctatacatcgaggctctgtcgcgcgccacacttttgtgtctctcttcgttttgctagcactttcactacatatggcgacacattgcctcccttttctctgcactgagtgttttcatcgttcctgactctgtgggaatacatctgagcttctcgtagtatcttgtgaccaatgccagtcgatggaggctcgactcttcgctcctttgcaccttcaaaagtgtgctgcgtcgatcctgacaggggaggctacagtgctgcactgataaaaaagcaatctgtactgacttctcacttcatgtatctatttcactcctctacgcgttttgctcgtcttcacagtgagttctttcacatttccagtttcaaacccgatatgtgcagcgtgccaatcagctgcagtagcactcatacccacacgccgcattcactcatcgtc

SEQ ID NO: 161 - DNA, 502 bp, Artificial Sequence
  IrLdA
attgcacggctcttatttgtcctttgaagtatatatatatatatatatattctgttttcgacttcactgagaagcggagaaatatcattaaaaaatttcagtgggcttgaatgtcgctgactaaatgtgatgcacatctcgaaagagatgcgtaggagatcgagtggctgacagtttttgtgttcaaccacttcccctccgttacaaatgtgcggataactccgtattttccggatgtggcacaatgaaaacgatatgtggatatagagctgttttccttgcctgtgctcgttatgtttgttttcttgtctctcttctgtcttcctctcgagattactgtgaggaggaaagctatcatctgtgatcttacatacctagcctcttttcgcgattacaaaggtactgcaggctcagcgcacatagatttactctctgaagggactgtgctcagtccatttttagactaactgaggagcactgacgacaacaaggatacataaac

SEQ ID NO: 162 - DNA, 629 bp, Artificial Sequence
  IrLdB
gtcctccggcctgacagcgcgcgcgccgctgtatgtgcgcgtgtgcgcggcttcccactggggccagcgatgaggcgcatcatacctccatagagaccctatcttttgttttctgggcttcccagatgaccacttgattccttccttcctttgatttgtttctctcctcccctccgcagagggtacgagtcagggtaggctcggagaaagcttgccgcatccacgatgagccacggctgtctctctctctctcttgaccgggacaggctgttgcccagtcacgcgtatcggcgtgcacacccgctcttgcgccctgccccactattcgtcgaatgatgcgctacgcgcatgacaggcgctgctgcagcgctgctccctgcggttgctgagtgcgtacatgccgttgctactgatgtgtttgcactgcatctcacctcgctctctttgcgcatgcgcttgcccttcctccctcctcgcgaccgtgtcggtcctctcgcgccgctgtggcgcagctcgccgccttccactcccccaaacacacacgctcatacgctcatatagcactcgtgcgcaccgacacacccacaccccctcctctctctcttctccccaacctacccatcgcagcc

SEQ ID NO: 163 - DNA, 414 bp, Artificial Sequence
  IrLdC
gtgactataaagtgctattgaatttttttttcttttcctttcacgaaacaaaaatctgtgtgtgcgcattttcttactctccatttggtgcgcacccttctgggggtatgaccttcagcacacacaaagaacgtgtgctgcgcatatgtgttcaatgcatgtgcttttcctctctttgtttctatcaaggaggttcatatgagagggcatgctcacagcagcttcccttatgcatatgtagccttctgagttcagatgtgatactgctcccttgatctcccttttgtgtttttgttcgaaacaacaatgacgctcttacattctctctacctattatcgtttctttcgcatctgaaagcgtggtactagttagctttatcttagtaaaacagttaccattcactgccaccaaaa

SEQ ID NO: 164 - DNA, 807 bp, Artificial Sequence
  IrLdD
agtcgtaggccgatgctcatatcttccccttttttcacggtgccgttccttttcttctttcatttcttcccttccgagacaacaaataaacgcaacacatagaagtatagacaggaactgcgccaagctgtgtattgcccttctcccccctcccacaacgacacagtgtgtgcgctgttcatggacgcttcatgtgaggaggaacgcgacgagagacggacagggatggagagccgcgctgaacacgcaaagcgcccgcccacagggacacaaacagaggcacagatggcccgctactggcttccttttcgccgccaagagggcgctgtgcatgcgcacgtgtggggtggcggtggcccaatagcacaagcgtgccgctgtgtatctgtgcatgacacagacatgcaagcatcttgctgctccggctccttttctcgtctgagtgtcggtcgttttttctgtctctcgtacgccaccttgatctttctccatccttccccctctttatctctcgccatctctgtgcccccgcttgtgcgaactgccggtgtgcgaaacccccctcccccaagaaggaggtatttgcgttctttctcgtcgtgtcttcccggcctgacgtttctctctagtcttctcggttttgcattctgagtgctttcatccctgctttccgtgagtccagcgtgcgctgcgcttagctacccgtgtgtgtctcacacacctacaccccgcctatactaaccctccgccctggcaccccctctctccatctcttctcttcgtcgcacgcgtgcacgccatccaatc

SEQ ID NO: 165 - DNA, 666 bp, Artificial Sequence
  IrLdE
acctgtgcgccgctccctcatttccggcggctcgcacgcgctcgcatactttgccacacagacgtcctcgtgtctactgaacaactaacggatttccatgtcatttctcgtttatcatcttcaaacacaagagcacaactgcaacgtcagcagtgaacgcccgacacaatcggagagcgtggtcacgccccttctgacttgcgccatgaaaaacgatgtgaggcagcggcgcgtcctctcctccgccagcttcaaagcgctcgtgcggtttcgcgtgctttgctcggtgttcctctcccgctcgctgacttgccccacgcgcgtatctgcgcgccggtacccctctgcgcagctcggctcgcctgcaggcgcgcgctctcgacacccccctcgtctctgtaactctgtctcttcctcccagccccacccttcttttttcctgcttttccgtttgtttgtacggcgcagtgccgcgaccagcccgttttggctctttctccgcgttgccagcaccagggggttggggtcaccgtgcgcgttgctcctccgctctctctatttccatctccttgctttgttttgcgatctcgccgacggacgctgtcaaaccctcataggttgcttttctccctttctcgcggaacgccggcgtgtcaagacgaggcc

SEQ ID NO: 166 - DNA, 870 bp, Artificial Sequence
  IrLdF
ggtccttgtgaccgcgcgtttggcggactgctcaacagagcgggctaacgctgacgaagatatgctggtttccctgtgtttgtgatttgccatcctttcgtgtcaaaaagaaacaacaacaacagcaacccgtttaggccaagaagcgggcgctcggactctttccctgcctgccccatccccatgaagcacgccggctgtcgcactgggcacctcatgaccctgttgatagcgctggaggccttcattgcgtgctggttgtgggggggggtggaagggggagaggcgtgttgtattcatgtgaggtggtggtggcattgcgcagcggtgggaaaagcagggtcttttccgtactccgtgacagagctgccgtgctcatcttttcccggttcactgcttgcactgttggctgcctcgccttctcccctccccctgcccccacgaaacgcggttaccgcgtctccttcgtgggagaagtggagtggcacagttaaggcgactacaaggagttccccctaccctggagggagacttgcgggcgcgggacgccttgtctacgtgagcgtctcttcccaagtagacgactccctcgactttgtcccctccgtcgcattccgcccctctccgccctcctttcgtgtacgtctctgcattgtacacttcctttcgcctgctttcccacgctcgcgcgcaacaacgtggacgcaccacatcgctcgctggagaagagagaaaagtggtgagtacgtgttccgctctttcccttctcccctccgctcgcgtcgcacctctccgcagctttaccgctctcttcccttccatcatccgcgtcgtgcaccacttccctcattttccgtgcggcagtagaaa

SEQ ID NO: 167 - DNA, 850 bp, Artificial Sequence
  IrLdG
ttcgcttcgcggtgccggccattggcgtactctcgctttttcttattttgcctttccttttcatttcatgaagaaacaaactgcaaacgaatcggacagcggcacgacctgcactcgccgcttactagactatcagcagcacagctccggggaaggattctctctgccacagagaacaatctcttggttttcttcccttacctcaccgcaacttaaccgttggtgccgtcttctcgcttgtgtgtgcgtgtaagtgtgctcttgccactgctcccgcacagcctgcctgattctgcgctgcgggcgaaatgaagccgagggtcttcgacccagcctcgtgccacgtccgttgcatctgctcgcttgtaagatggctgttgatcgcctcctcctccccatttcttcatttgattggcttctggggcactgttcagctcccttcacacataccggaactcaaccaggtatccgtcgacaccgctcgccatcgtgcgcgttcaccggccgcacggcgcctcagtcagccttctttgccactcactcgatcaccacagacagagtgcagggtgtcgtgtcgcacaggactacctcgcggatcgtgtcttgcgactttggttgcgctcacaccttctcgtcttcttcgttctctcgcgaggagctgcaaatcgtggtttctacgcctttttctctttcccggtttgacagcgtctcggcgtgtgctgctgttatcccagtccagggctctcttccacacctcttcggaagagtcttgtcaacgttgacggtgccacgtaggaagtaggcttgaggcttttcgcgcttctttttgtcctagccagaagaagccgca

SEQ ID NO: 168 - DNA, 385 bp, Artificial Sequence
  IrLdH
cgagcgagttgcctctgcgctggtgaacgtgcctgcgcacttacgtatcagccgtgctttctgggaagaccttctgcgacgcggggcgttgcgccggtacagatgcatcttttgcatggtgcgtgctcaccacagtttgtgtgtgtgtgtgtgtgtttgcgcgcacctcccatccaacaatggcgcgaacggctttctgtgcatgcgccctttcattttaactttctttttttcgcccttgtttttgtgattttcgatgagctcaaacacaaaatgaacatccacatgcactcttaggcgcacttgctttgcgtgtgcgtgtgtgcgttgcggtgctgccgtcagccctacgccccggtgcctccgtctctctcccatcgcatca

SEQ ID NO: 169 - DNA, 655 bp, Artificial Sequence
  IrLdI
ggatgtgagtggacgaggcacgtccctagcttgtcttccgacgtggtgcgccgtttctttctgtcgtgtgtgatcttatttctcctcttctactttagtttttacatgaatcagccaacgtttgcgtgaggccctctcctttcctcccctcttctgccgcgtgcttagtggatgggtgggtgggggcagggggagagggaggggacgacgagttgtcgagcgatgtcatgccgcctttgcaaaggcgcgcgtgagcggcgacgggggcacccgaccgcccctctgccgcataccatctcggtagtcttttttggctgccgatgctgatagatctgaagtgctattcattccgatataaacgagactctatcccgttgaggagcaggcgcacgtgtgtgcgtgcatgtagggtaccctccattgaattcgcgcgcacctttctctctcttctccccaccctttctctttgttggtcatgccgctttcccagatgcgcgcccactcacgtacacatacgcacgtattctcaccttttcgtacgcatgcagctgcgtgcgctcacaaactgctgtgtgtgtgtgtgtgcaaaaaaggtgtaaccgctcgtatagtttcaattctccggtgacatccacgcgccgcgcatcactcacga

SEQ ID NO: 170 - DNA, 827 bp, Artificial Sequence
  IrLdJ
aggaaggataatgtgaacggacagcttctctgttctttttcgttttaatttgcgattgtttcccgaagaagaaaaacaacaataccgaaaagggacggaaaaatgtgcgcttgacagaatggcatgtgcgaagttggcggcagcgcacgtgcacacctggtgatggcagcagcggcgacagtatgcacgcatgcgcacacctggcaacgccagggacggaaagggaagaggatagagagggtcaagtgtcggaggaggacaagcacagaaggggaggggcgaggtcgtgacggcgcgcgtgcttgttttgctccgacctctctctccctgtgtgttcccaccctctctcttgatgcttatctgcgcgtgttttgcataggcacacacgcgacccgcgctgttgctgtccgctgccgtcatgccacctcccgcatttcctctcctctgcacccgtagtgctcgacaatcgcagtaacaaaaaagcgtgcgcttcttttacatgcttcatgtccgacccctctccgtggtgcgttcacacttcagcgcgacctcttgctcctcccccacccccgcccttgcctgatctgccagagtcggcagtacaccaccctctcgctctcgtcctcccttgctgctcaatatccacgctgagacacacacccacgcagacgcaccaaaagccaagaaggggagagggtgggtgaaagtgggcggaggaaacctcttgccgcggtgtgcatccgtctgtctgtctgctccttgcctctctcgacgattggtgctcgtttgctctcttagtgcatattcgatgctttacatatttctaa

SEQ ID NO: 171 - DNA, 688 bp, Artificial Sequence
  IrLdK
gcgagtgcgacgtcttcctggctctttcttttccttttagtttcattttcgtgaacgcaagcatatcacacaaacacccgcgatgtcgacaagcgtgtatacgcatacacacatgtcggtgtacgcctcatgtgcccccatggacgtcagtccgggccatgccttccccctccccctccatcccaacgcgtgtgcgatgaggtttgaagggcacctcggagtgcggaatgcgagcgcatcggccaagccaggtgatgcaccccctaccctgtgcgagacgcatggctgcaggtgtctatgctcttttccagttgcgcacagcggcagctgtcgctgtaggctggaggagagttcctctccattagcggcgcggccgcaggtgcactgtcgcagcaaccagcacaatctcctcttattcattgatcgttttcccatctttgcgcgtttgtctcgctcctttccctccttcctccctccgcgtgcggtcctcgcacgcctttgtgtgccacgcgctcctccgtcactcgctgcccattccctaacaacgcagcccgtcgcgtagcttgcccgtgctcagggaagcggacaaggctcaccgcatacctgccgcgcgttacatggaacctatacgctgcgcacccgcaggtgacacgaacgcatcaatcgaaggcaacacgcacgcacacag

SEQ ID NO: 172 - DNA, 856 bp, Artificial Sequence
  IrLdL
tcgtgcacgtcttttcataggcgcctgcagtgatctccgctaacgtcgcagtgatttgctcgatctttttttgttcggttacgttctttttcgtcatttttgaaaacaaaaaacaagcaaataacgacaaactaacagcggcacacccacactcaacaaataaatcgcgaaggagcgaaggcgacgcctcctgcgaggcgccacacttccccgatgggaccctctctacttcgtacgagtcacatgccgaggcgctgcgtaaaggaccatggcgcgtgacgcgagtggcaagagccgaggcggagaagggcgctggggacggcactctcgatgatgtcagcaaagatgaaggcgatgccattgcgccagcgcaggtgtttcggccgtcgttagccactcgccgccatggcgctctttgcgcgttggctcagggaagaagaagagtgcaagccgcacattcaaagcggtagagcctcagtcataaggctccgagtttcgggctgtgtccgtctctctccttcccctcccctcccctctcctctccgtttcttcctggtcccgtattcttcttcttgtcgaatatgcctttttcttgtgttgccatcctccattacactcacctcactactatacggtgtgtgtctctttcttgctattcgcatgtggacgcgtgtgccgtcctcaatgaccgtgcactcatctgctttccttctctgcctctcattggacacctacactcgtttggccctcgtgctttctagtgcactttgccaggaacttgtaccgttttagccttgctgctatctcacattcgaatcggcaccgttcctgctagttcgaggacacccttgcccac

SEQ ID NO: 173 - DNA, 936 bp, Artificial Sequence
  IrLdM
gatggaagaagcacgcccttgtgccgcaccggcgtggggacgcattgtgcaggctgaaggcgtttgcctctcatacgatcggcgcttcgagtacctttgggctccctgcgtcgcacgtgtagagagcggcccgacccccccccctcgcgtccgtcttgtacgcggcactgactgggcacgtatacgacgttgtgaaaacgccccgatcgtttcgttttgcttttttttttgctttcctctatgatcatcatttcaccgcccaaatccctacacaaagcatgcgcatccacgcatccaccatggcaggagttgtcgctgggggttttctcagcgaggacgtcatctccgtatttgcccgtaccgtctcgcgtttctttcgtccgagttctcggacggcgcgaatctgcctccacgtgccactgactatccgccgctaagtttgcttgtgtggttgactttcaacagcgagcggcgacagttggtgtggcaggcgcggcggaaaagcagacgcggatatcaacactatggatgctgagtcgttgccagctccatgggcggcagcattacgtttcgcagcttgccatccagaagagcgtccctcccccaaccaggtatcgcgctgtaaatgtgtgtatgctccgcgcgacctcagaggactgtagcgcgagcggccctatcacccaccgcacatgggctgctctgcgcctctgcgttctatgtgcgtttccactctccgcttcactgcatcaccgacacgcccctcacccccttccctcacacacacaaacacacaccacggcaacgtcctacacaatgcgcgcctcccgcgcgactccacagtaaactaggtttctcaagctcgaagtcaatccaccactatctcatactatacacaccccatatcctctacccctttgaccattcaaaacatccgcc

SEQ ID NO: 174 - DNA, 901 bp, Artificial Sequence
  IrLdN
gaccacggcctgcggggtgggctcgatgtgtacgtgctggaggtgcgtgtgagcctttgcgaggctcacgcccactcatgcgcacacccgcaacgcgccactgcgcatggaaagctacaggcacacgctcgctctcgttcacttctttgtattgatttctgtcttgctctttctgtcatttctgtggcggtatatgacggtcaccgaggacgagacgggtggggggggggcgaaggagggccaatctctgatcccacgcatcttcctcatccccacaccctccccgactcgcgtggccgagcatctctaccgacgaaaaacaaatatatgaaaaaataaaactcaaacacgaaagtagcgccccacccccagaaaagagggatggcgagctagcagctcgtgcgatgcttatcgaagcgcacaatgctacgagcgcaacacgtgtgtggtgtgcacgtctcttcgtgagcaaaggcgctgctctaagaggaggaaaggggtaaggcgaggaagggtgaggaaagtgctcatgtcggccacttccctttttagcgtttatcgacctcaagagcagcttcgcaaagaatacaaaaacggagtgtggtgttcagccactaccactgtccacacatattgcgttgcgagcgagcagtgcgcttcctctcgctacgtagatgctcagctgtggtgcatcgccgtgaaacccctctcccctcttcatcttcgttcggtacccctctccatatgctggcattctaggggctctaaggaagtcacgttgtgagctctatgtagtgctgtgcagcctcctctgcgcatactctgttgtctcgtcatctccctctccatgactgcatgtctgtgagtgtaagccacattcatcgcttcgcattatttggca

SEQ ID NO: 175 - DNA, 627 bp, Artificial Sequence
  IrLdO
ggagcgcaaatgtgtggaactgatacgcgactgcaacgggtgacctgtttgacagctggtctgccttcgctcccatttttgttttctgccagccgctgctgtaagctttgtagtaacaaacagtctcatgcagggcgggtcgcgcctacgtcgttttgttttcgtccctcttcctttaggaactaagtaggaaatacttcacgcctgtcgtgtgtagtgaaaaaggccgaaaaagcgcagagaaagagagcaagaagcgcgttgctgtgcggaaccacgcagagcagcggcggcaggtttgcgagatggctcagggtaagactcatgtgcgccgctgtgtgttgcattctgatcgcacgcatgcctgtgtgggtggtgggccagtgctttgtatgagtattctcttgttcaagaggtgccggatggcgttgctgatgaaaggcggcttcgtgctgctgtgcgtcctgctcctctccgcggctgtcgtcgcctgtgttatgtcaattgaatgtgcttgcttcctgtgctggccttacaaccctttgattgcttcctttttacttccctgtgtagagcatatctgtacgtgtggtagttgctcaagcgcgtgcgctttggttaggagcc

SEQ ID NO: 176 - DNA, 682 bp, Artificial Sequence
  IrLdP
tcgacacaacttttacgaaaaggaaaggagaacaaaaatactaacttgcttgtttccgtcttttttgttgtttgtttcaagttgggaaatcttagcacttaggatattacaaagagcttccctttttttgttcgccgtgtttgggcaaagtgggaaaatgaggcgttatattgaatcagggtctcagcgctttgtgatccttttttccgcagccctaagcacgccttcttttctgatttccttttattttgctggtcagctcttcagattagtgtagtcaagcaaacaaaagagttcttgggaaatctttaagaaaagagtgaaaccttggtgaactgtggctggggcagcagccaccacagttttctgtcgatacattctggagttcatcgaagcacgtggcggcgcaagtcgcccctaccgcagcagaggctcggtaaagagagccagcatacctctgatgagcacgccttgcctttttttttttgcagggtcgcagtgatctctttcacgtactgaagcccaacttcatgtaatgattctaacgtatacattcccctctattctactcaagattttcttgcgaggccatcatttcattttcgttgatatctgttatcaaaaatgcgctttgccttgtgagctaccagcgtctttccattcacatgaagcggcgctgata

SEQ ID NO: 177 - DNA, 955 bp, Artificial Sequence
  IrLdQ
agagggaggagagatgaagaagaacgcctcagcccttccacctagccgtgatgcacgggtatcacagaccagcaggcatgcagagatggaaaggggaagaggtcagcaggcagtgacgtctgatctccttcagcgtcggtcgcttcggccgcttcctctccgacctccccccccaccaccactgccaccactcctcctctccgcataacctatcagcagtcgcgcacgcctcatcaatacgcacgcacacccgccggtggcggggcgcaggatggagaagggcagcggatggagcttcccttctcccacgcccttttcaccccaccacgccgtgcgggttttgtggtttgtgcgtgtgtttgtgctttctagtggggagaaaggcctctccgcatcgttcaactatttcgctctgcgtgtgagcacgcgtgcgcacttgcgcgttcgcgtgctcgttcctttcttgccttctttcgccctccgcgtgcgtgcgtgcgtgctctcccatatatattattctggtttccgttccgtgtactcttgtgttcttaggaagctgcgcagacccgacttctcccatcgttgtgccctccccctcctgctgctgctgctgctgcgctgcccgtgggtgtgcaccccagggggggggtgtctacgtggtgtgttcctgtgcgtgacggcgagggcgacggccgttggaagcgcacattttttccgtaccgtcgagagccgctcctcctcccaccgtgcccctcctccgcccccgctacatgtgcaccccccccccttcactctctccgcatgcacatcttccttctcgtcttcgccttgcctcgcctacccacccgtatagcagtgcaccagcacacacgcacgttctttcctttcatccctcttgctctctcgctctgctgtcctccttagcaggctccccctgcagcgctacagcagccgc

SEQ ID NO: 178 - DNA, 559 bp, Artificial Sequence
  IrLdR
gcttcatgtacaatcatcgcgcacctttctttttcattgattagggccaactccccaccgatgtaaaaaaaatcctgaaagtgggatgacacaattcagtgacaatggaaaaaaaagaagcgtgattggtattcaagcttcacacacgtatttccccccatacacaaggatgtgttattgttttctacttgattcgggtacgctcaccacagcgcacctcgtctgaaaagcacttgatactgttccttctttcgcgtatgttcatctatgaaagagcaacattattcggccacctgtttcgcgtgggcacacgcacactagggctatgatgttttgcttcatcggcaatctgtgctctgctgaggcagccgctgttttgcttggtgctctttttccctcttctttggtgcaatgcattccgcttgtcgcagcaaccattctcccactctgtttctttcaactgtcgtcgcttctattccctcgatcttttatctggatgcatgacaatatgcagaacaaaagcaagaccagtgagtttggtttcgtttccacctgaaaa

SEQ ID NO: 179 - DNA, 601 bp, Artificial Sequence
  IrLdS
gcacagatgtagttgatatggggaatgcgtttgttttaccatttcctccttcgctatgaagataaaaatcaaaaggaggttcaacgccgtttgatagcgtggcttttattgaaagctctaagccagcagacgcagttttgcagtttgttctctatgtagtctcagaaatttccgttcatgtatactagttttttgtgtgtgttgtgcgaaacagagtaaatacagcaaaaaagtgaccgcgtgagcagtgcgccttagctgcaggtcaaggatgatgtatgcagtacgtatgctgcctagtttgcatgcaaatagcattttttctttctccagcacttggaacgccaagaaaaatatacagatgatacgttgcccaatctcctgttgttggtgattgccgcatctcttatgcttcgtcgctaaaagctgcgttcgcgatgcgcttgttgcggaagtaatgcagaagcctggcaaagaatgtgcattgttgtctcagctgtactcttttccctacacctcgtgtctctactgctttgcgtagtgtgctcgcttagttgatggtttgaatatcactctcaagggatctttcccctctgtagca

SEQ ID NO: 180 - DNA, 719 bp, Artificial Sequence
  IrLdT
tacaaactcaacgtcttcatggcatgcgcctggttcctaaccgtttctcacacctgtgcttgccacagcaccaatgtgcgtgcatgcacgtgtgtgcgtgttcgtttgcatgttaacctcttgatgtacgtatgcatgctcatctctttttcttcctgcgtgcgcgagtgtacgtgccggacgcctctttcctccaaggcggcgcttgctcgaagcacaagcgtaaaagagggacgaaacgaaacgagaaaaacaaaaagatgggcacgcctaaaaagaaatggccccaaagggaggtgagtagccgaggagctgtgcatcaaggcagcggcttccgaactgctgcttacgccacttgcgaataccgccgctcatgcgcgtctggtttgagcacaactgcggtatctgctgctctcccacgcctcattactgccctcattggcgcgcctataagcgcaaaatcacacgcatcccctcacccacggcggtgtcttgtcgggtgtgttatctcgagcttgagggtttggggcgggtatagtcaggtgcgctcaaaaccttcaacgacatttgcaaggctgcttctttgtcggttacggagtcatttagggcattacacgcggcgtctggcgtctttttgttatcctggtctgcgtgggtgcaagtccagacacacacacgcatacacacacacacacacacatatacaacattatccttcc

SEQ ID NO: 181 - DNA, 580 bp, Artificial Sequence
  IrLdU
agaaggggctttcaggcactttccggaaggtttagctctttctcaattaggtcttttttcccttttccctcagcgcgatatgcagcactgttttatctagttttccctgatgtctagcgcgagatgggctctcgtgactagtctttttttccacgactctataaccgagaaaacacacactgtacatagcaagcaagcgacatcattctgtagcctgcccaaagtttcaaaaggctgtctaggtactcttccgcggctccaacttctttgctgtcctttgcttttagccgctcacattacttctccgctacaccgagctgtccaggtggctctcatctctccttgactacgacaatgcggaaactctcttcccccttcaacttcgacagttcaccgcttcttccctgcgccctacacggctttactctgcacactatccggaaagctgtatgctgaacgccagccactgacgatcagaagtctgtttcgttcccctaactactccttttcctttcttttttgtgttcgtcttctccctttacagacaggacacgcaaacacacacacacacacacacaca

SEQ ID NO: 182 - DNA, 801 bp, Artificial Sequence
  IrLdV
gactgcaagggatgtggcgtttataggctgccctgccatcccttgctgtttctatcaaggattagacttgttcgttatatggggggaggacaagagagtgctagcgcttcttcttttttccctttctttttgctttgctttcttcgtgttggcgtccatgcaagcgttctgtcgacagctctttgccaacctgcgccctatctagcaacatcgatgtgaaaagagtagagaaagctaacgatgcgtgcgctgactgccgttttcatgggcacaattttgagaaggaaaaattggagaatggacaggatagtgaaattagcgctacgacaaggacgtgcgtcttttctctgtcggtcattaaatttttgggctttgtaacaatgaaggaaatcgcacagaaagggaaagtattcatcgatggtcaatgccggaacggtacatcgagcgtgctttctgtatgcaatctgaggatatacggtacttgtgtggcgctgctgtgttatcgggacgaggggttgtagcggtcgacattatgtgttcccggcgcttatcgcgcgccttcagcgtaagtgcggttactcttaactgcgcgagaaggaactggtggcccatgagaatgacatcggtcttctctgcaatgcctccgctgtttgttgccatgctttctgtgctattcgtctactttcccttttctcttactctgttttgctcttattggttttcctttgcgtgtacacggtgggcgcgatgatagccgtgcaacgtgactctgcgagcatgtgcaccaggtggcattgaaaa

SEQ ID NO: 183 - DNA, 487 bp, Artificial Sequence
  IrLmxA
ggtttatcagctccaggaacgaatgtacttttattattattgtttcgtgtcatgtaattgactctatttaaaaccaagcaaagcaactctttaccagggaagccgacaaggctttctattcccgaagaacctttgcggctttccaactcataggagagccgtctcttccccacttcggcttcaataaaggaaaatggcgtctttcgagtagaaaagggcagatgcggcgcattgcgtgctttgcacctatatccgccacagctcgcatttcgactgcgtagaaagtagtggaaatatgttcttcaccaagaccgtgcctgtttgctctctcaattctcgtttcgctataacatcccttcctctttaaaaaaaaatctgttgtgtctctgcagcatttctggtacccgagctgtttcctctcgctagggaagcaacaacagctactgcttgttgttattagtgcgaaatagagcatctgaaacggaaa

SEQ ID NO: 184 - DNA, 624 bp, Artificial Sequence
  IrLmxB (40S ribosomal protein S19-like protein)
acccgtgacggcatgtttgcctcttttgcattttattttatttttatttgctagtgagagattctcatgcgcgtttataaaaaaagagaaagacaggcgatgagggggcacatctgtgatccttgtgcaccgtgaatggcgcctgcctgcgcctacctgagaagcagtggggatgtcacgcctctcagacacacgttcgagacaggacgttgtgaatgctgtttctccttctccgtcttcctcgcgcctgctggacaactggtagccaatcgtgttgtccttttcacctccgcttgatagggtcacaagcggcaaggaacgcggagggggaggggccgtaaaggtaaaggagcccgtttctacaggggcaccgtgcgtcatgttggcaagatgatgtagaattttttaaggggccggccctatccccttctctgtgctccgcacgggtcgcctttttttctgtcgctgttgttgtcgctactcacgttcttaccctccctttctctctctttggagctgtcgtcgtcacacaagcgctcaacctcttgccagtgagtctgttggacaacgttcaccgagtaaaagacgtctttgcgagcctttctatgacggaagctcggagtc

SEQ ID NO: 185 - DNA, 780 bp, Artificial Sequence
  IrLmxC
agtgtgcggggcaaccacacgcgagggacgaagacaaggataacagaaggcaacgcggcaaaacggaggacggccgcatacaaaaacaaacaaacaaacaggtgagcggacgcacacctgcctgagaagtgcgctgccgcagcgtgtgtgtgtgtgtcgccgcgttgcggtctgtaccctccccccacttcccctgtctgcgtctctctctctctgtgtgtgcgtgggctcattttctccgtttctttttttcgttttgttttgttttatttctcttcgaaaatgagaaaaacgacccgaaaatggtctccgccggcgttgtatctctgccccccccccgctgtcccagagcgtagggtgcaccgtctgctgcttccccagacggcgcgcaggatggggcggcagtctcggaggctgcgacgtgtgtcatgatagctgtgacggcgggtgcgtacggctgcttctatctctgcggcgatgcaccgcctcgtgttgcgttggatttccatccaactcctctccccacccccacccgaggcgtgcgtgtgcggcggtgtgcggtggctcgcacacgacaccttgtgtttccatcgcatgttgcgtcgctcgctgcagttggtgctctgagcgttttcttcccccttctcgcagtctttttaccccttgctttcatactccacagagaaaaaccgctcccgtcttgcagccggggcgtgcctgcgctgcccaccccgcacccatttcctttcctgccgttgtgcgttctgcacatcgttactc

SEQ ID NO: 186 - DNA, 668 bp, Artificial Sequence
  IrLmxD
atgtgtctttctgtgcgttcgtgaggggagagaaggattgcctgctttttcacgcgcgcgctctctcgtacaccaaaacacctcttcccgcgttcactgcgccaccgccacacggcatctcttccccctccccttcgctttcgcggtgatggttggagtgcggcggcggcggagctttgagctcgtgttttcttcgctttctttatttcgttctcttgtgatttgacttaccaaacacacctttccttccccgaaaaaaggtaagaggccacacaacgcagcacagcacacagggatggagggagggaggattgggggcgaacggggcagcggatagggctgcgcgcgcaccggcggctgaggcgtcgtgtgcattcaagctctctctctctctgtgcgtgtgtttgcggagagtcgcgctcgaagccccttttcctttcatctccttgttttacacaagcgggggttcgggcaagagagaaggagagggagatggagggggggacgggttgctcagcggccgccagtcttcccgccccctgtcctctccttctgtccaagtccacgctggaacagcggtgctgctgttgtgccctctgccatgtacattggcagggaagcagcgcacagcgcaaaacgtgcgcatacacgcacgaaagcaagaaccg

SEQ ID NO: 187 - DNA, 596 bp, Artificial Sequence
  IrLmxE
tccgcgtgccgtagctcgctgcgtatgaggtactcggttccagtgcatcacgcggcgcagggcaacacaaactttctttttgtttctcttcaagtcaaaaaagaaaaagaaaacagccataccgcacaccatccataacaaggggcgtgtgaggggcggcggctctcgggctttaccccgccaatgcagcaacacgcggcttgtacgcaacgcttcttttggcatgtcacgctgaacagaatctctgcgtacagcaaccacgttgccatcggcccgtcactcgctcctctctcctccagcattcttgagtgactacaggtatgtttggttcagtgcgtatgcgagcgttagtgcatcccctatacaagcacgtgccgccagggcgcgtatcttcgcagtgagacgcacttgctttaccgactacctgtgcttaagtcccccccactgacctaaacaaactctgaccatcgcatcacctctcgtttcgtcgtcgtgcctctctccctttctctgccgattgtgattcctctcctcatgccattctcctgaaatccctcatcactcttccgcaacagctccttttttccccaccaagg

SEQ ID NO: 188 - DNA, 316 bp, Artificial Sequence
  IrLmxF
cgtattcggcagctgtcatcacttttttttctactttggcaaaagatcaagcgagaaaatcaaaaaacaacaacaaaaacaatataatggttaaaaagttgtgcgatcacagtgcctaactgcaccttttccacgcgagctactcctgtgctctggtgccttctcttttgtgacaatctctgtgatatcgcttgatgctctactattccttctgtgctatcatctctgttctctcttgaacccctgcactattcatctgtgtgacgtgaagccagattgctctttatcctctcgccagctcaagctcgacaagaaa

SEQ ID NO: 189 - DNA, 465 bp, Artificial Sequence
  IrLmxG
gtgcggcacgcatgaatttacaggccaacattctgttctgattttggttttatgggagcgaaaaaaaaagcaacgttaaagatgacaagcgcagttgcgctgcaggggtaggtatgctttctgatggggagatgcaccgagaaagctgagcgtcgtcgtctcacacgctgaagcgaaagcaagcctgatcgtccgcgcgctgcttccgcgttacaatgaactcgtgagttagcagatttgccttttcggctgttctccccccccctcttccccgagtgctgctcaacttcctcatgtcttcttgttttcttttttacttttgcctgttgacacggcatctttacgcttcgcattgcgtttctggtggcattcactgtttgtcgcgaagtatccaaagagtttagcggcacgttctgtcacagagccgattgctgctttctaaaagtaggcgaggatgcgcttaga

SEQ ID NO: 190 - DNA, 983 bp, Artificial Sequence
  IrLmxH
agatctcgcccaacgagatggtgtgaaagggatacgtatgtgagaggtgacgtaacacccccacacacaccccacatcccacactcacacacgtcgtgggtgttcgcctggagacgtctgcgcggctcttctctttctgatttcactcatttcaactcaaacgcgaacaatcaaaagtcgactcgtctcaccagcgtgtgtgcgcggcgttcccatcctctctgccgccccccccctccccctccccctcacactcacacacaccctctgcgtgcgtgtaagcttctcagtggtggaggggcgaaggagtgccttacaggcggcgccgtagttggcggtgttgtccggattagtgtgatgcgagtgaccgcccctcaccccccattcgtccatcccctcgattcgttgctcaagatgcgagcttgtgcgttcgtcttgcccccattctctctctctctcctcacttgctgctctgcatactcgactgtgacggtggtgcatccacccactcacccgcttcgcggcggctcatgcgcacccctcgccccagtgggcagtgtgagggccggcggagccgcgctcgagtcacgtcgacacactgcctggtcatgtgggcggcgcacaggcgtgctcgccgtcgcaggtcgctccgacgcagcgcccgtccaggacctggccgccggcattagtggtggtgcgtcgctctgacctcccctaccttgtaggtgcttggccctgtcaccacgcgacgtggcttggcattggcagggttaggtgggggctgcttggcgtccgcccactgagtgggggcgccgtgccctgagatgccatgcgctgtatgaggtgtaccccggtgatcagggccacgaaaacactgctgtgaacaggacagagggacatcatagtgagcctcctcagtgccctctgtcatcgcctgccatccctcggtgcaaggaacctcgagcgtcgtcaccgacacaccg

SEQ ID NO: 191 - DNA, 855 bp, Artificial Sequence
  IrLmxI
aggaaggaaaatgtgaaccgacaacttctctgtcttttttcgctttaatttgtgattatttccccaaaaaagaaacgcaacaaccgaaaagggaaggaaagatgtgcgctcgacagaaaggcgtgtgagaagttggcggtagcgcacgtgcgcacccggagatggcagcggcggcagcggtatgtacgcatgtccacacctggaaacgccagagatggagagagaagagggcagagaggctcaagtgtgggaggaggacaaggacagaaggggagggggcgaggtagtgacggcgcgcgggcttgttttgcgcttcccctgtcgtttaactccgatctctctctccctgtgggctcccaccctctctctctcgatgcatatctgcgcgtgtgttgcataggcccacacgcagctcgtgctgttagtgtccgctgccatcaatgccacctcccgcattttctctcctctgcacccggtgtgttcgataatcgcactggaaagaaaggcgtgcacttctttcacatgcttcatgtccgacccctctccgtggtgtctctacacttcagcgctacctcttgctcttcccccacccccgcccttgtctgagctgccagagtcggcagtacaccaccctctcgctctcgtgtcctcccttgctgctcaacatctacgttgagacacacatctacacagaagcgcaccaaaagccaagaaggtgagagggtgggtgagaatcgacaggggaagcctcttgccgcggtgtgcattcgtctgtctgcttgctccttgcctctctcaacgattggcgtccgtttgctctctcagtgtttgctcgatgctttacaggttttcaaa

SEQ ID NO: 192 - DNA, 433 bp, Artificial Sequence
  IrLmxJ
gtcggaggcatgcaccactctccaaaccggcaactctcttccctctacgtgtaggagtgctggcgacgtgcgcaatgccccgtgcactctgctgcgttggcggaacggaggagcgacgttgggaggtgacgccctcgtgcgtctcttcttgtgcgctcttttttttttcggtctctgacttttttcttttttcctttgaatggctcatttcagtaccttttcccttcacaacgtccagcgaacatatgcgcgacagcggcacggtgctggtgggcagccactcttctcgaaggggactgccgttatgcggagagcagggcggccctcttgaggtttcctgcaggtgagacagcgagcgtttagaaggggagctgagacacccagccaccttgctacctcgcacagcttcttacgcaacaccactcgcgtctct

SEQ ID NO: 193 - DNA, 623 bp, Artificial Sequence
  IrLmxK
gtcagctgctgcgtctgaggactctcgctggcttgtctggacgcacaagggctggatgcctgtgcctctgtttctgtttcgatcacgcctttctttcttttttattaaaatggtgttggtccgtgtcctcgaatggttctggtgtcttaacaagtgactaagcagccgcacgaacagtgaagggcgcacccacgaagcatgggaaaaacaatgcagcagcagacaatgcacacgcacacgcacacgcatgcacaggaacgaaaaagatggacaccccaaaacaggcgaaccagcgcacgagggagcggggggagcttaggcggggaaagaggtggtggtggtgagggagaggggcgcgagggagcggtgaacaacaccagcaacacaacatcgcgctcttcccggcattgtcctgcttgcttctgtcgtgcgctcaactatcctgctgcttctatcgctgactgctgaccctccacttcttctgttgaacaaccctatgcgttgcggtgatggcactgcgcaaaccacatccacaacggcatgattcccatgcgcatgttggcaaattgggtgcgcgcgatcgtcacaaagaaacccgcgaaacactcgcccacgcactcgag

SEQ ID NO: 194 - DNA, 838 bp, Artificial Sequence
  IrLmxL
tcgtgcgcatcctttcacacgcgcctacagtgatctccgccaacgccgcagtgatttgctcgctctttttcttccctttttggttacgttatttttcgtcatttttgaaaaaaaaaccacgacacatagacacgaaagtagcgaaggagtgaaggcgacgtctcctgcgaggcgtcccactgtccccgctgaaccctctctactttgtacgggccacgtgtcgaagtgctgcgtgaagcactatggcgtgttacgcaagtgacaaacgacgaggcggaggaaggtgctggggactgcactctcgatgatgtcagcgaagaggaaggcggtgtcgctggaccagcgcaggtttttcagatgctgttaaccactcgccgccatggtgctgttcgcgcgttggcccagggaggaagatgaggagttcaaggcgcacatacaaagcagtggcgcatcaatcataaggctcggagttcggggctgtgcccgtctctctccctctccctctcctctcctctccgtttcctcctcgtcccacatgcctctccttgtcgaatgcgcctctctctggcgttgccattctccattaccctctctcccctactctgcggtgtgtgcgtctctgtctttgatattcgcatgcggacccacgcccatgtgtcgtcctcaatgaccgtgtgctcatctgcgctccttctctccgtctcattggacacctgcactcgtttggccgtcgtgctttctagtgcactttgccaggaacttgtaccgttttagccctgctgctatctgacgctcgaatcggcaccgttcctgctagttcgaggacacccttgcccac

SEQ ID NO: 195 - DNA, 735 bp, Artificial Sequence
  IrLmxM
accggcttgccggatgccgtgtgagtaaaggagggggggggcgtgtgtggttgccgcagacgctgtcctcggcgcctgcggtgtggcgcttcccttctccttctcctccggcggtgtgtgtcatgcatctgcttgactccgccccctcatagatgcaacttttgttttctctcgacattttatttttcacctccccctccctcaatgtgaagtgtatgtgacagcgtactggacatgaagtagaacaagaaatgcccctttgctgcggagccgcagatgagggtggtcgatcgcgtcttgcggcgggtgctgccgtctcagcaggggtgttggagtgtgacggcgacacgcgtgaggagcatcctcttgctctcacctacgcgcagctgttctagcctcttgtcgcactttctgtttcacaccgattccccgtattgatctctgggtctcgccagggagctggcccgttcgagctgcaagcaactcagctcgtttccctaccacctccaatctctctcccttcccgtcacccacccctcttcatgcctctgccacggtgtgcacacacgcatgcacacacccgcacgcggaaaccatgcagctattgaacacacgcgatttttatttgtttttctctaaccccctccgtctttgtaagaagcgataccacccgacgttggaccagagagctccaaaaaaagtcaagagcgaaaaggtgctaattttcttttgaaa

SEQ ID NO: 196 - DNA, 685 bp, Artificial Sequence
  IrLmxN
atgcgcctggctgctgctttcaagcacgtatttcttccgtcgtgctatgcgaagcccgtgagatgtcttcttgccttgcgctgtgggctgtgctcgtaagttttgttttccttttctacgattctcatttccttgtttctaacgacgttctaccaaacaagtacacataccccaaacgttatcgtggagtcagcaggggcaggtgagagggaaccgggcactgcgccgggaaaacgccaatcctgcttccgtgcttgtcgggcttatcatcgttgcgtgtcccgatgagtctacgcaactcccgctctgcgcccgaacagtggactgccctgcgcttctgtgcatctttgctctctacagccttggcattgttgctcgtgtggcagtgcgtatcgatcgcctttttgcgcacctataccccatcctaggcactctcctgatgcggcgtgagacggaaggtctcagaggcatatggaaatgtgcgcccaccgggggtaccttgaattattgttctccgtctctttttctctctgattccctttggccctttttttttggtacctccccatgccgccgttgctgtcaccccacttgtgggatgtacccacaacccaaaccacacaacactgaaccctctctcctctactcctacctccacactgatgtgtgtgcagttaactggaaa

SEQ ID NO: 197 - DNA, 889 bp, Artificial Sequence
  IrLmxO
ggagcgcaaatgtgtggggccgatacgtgactgcaacgggtcacctgtttgacagctgttctgccttcgcttccatttgtgctttctgccagccgctgctgtaaacttggcagtaacaaacagtctcgagcagggcgagtcgcgcctacctcgtttcgttttcgcccctcttcatttaggaactaaataggaaatactttacacctgtcgcgtgtagtgagaaaaaaaaagacgcaggggaaggaaacgggaaagtacagagagaaagagagcaagaagcgcgttgccgtgcggaaccacacagagcagcagcggtagttttgcgagatggctcacgttaagactcgtgtgcgccgctgtgtgctgcattccgatcgcacgcatgcctgtgtgggctgtgggcgagtgcttcgtgtgggtattctcttctccctcaggaggtgtaggactgagttgcggatgaagggcggcttcgtgcatccgtgcgtcctgttcctctccgtggttctcgtcacctgtgctatgtcaattgaatgtgcttgcttcctgcgctggtcttacaaccctctcattgcttcctttttactttcctttgtagagcatgtctgtacgtgtgttagttgcccaagcacgtgcagtttagtttggagccatgcgtgcaccgctcgctttgctgctgctggccattgttgtgtgcctgtacattgcagcgggtaatgccgccgatcttgtcccatcacccgtcatacttcccaggggcagaagcaacaccaaggtcacactctacgtgcgcaccggacgggtttccatcccgctcgagcggaccgatggggaagaggttttctttgagtacacaggacgcttgtatgaagagggtaacagcggaccc

SEQ ID NO: 198 - DNA, 705 bp, Artificial Sequence
  IrLmxP
tcggcgcgactttcatgaaacgaaaaaagaaaacaacaaaaacactaaactcgcttgtttccatttttttgtgtgtttgtcaaagtggagaaatcttagcacttaggatactacaaagggcttctctcttttttgtttgtttgtttgtttttggtttcccgttgttaggcaaagtcagaaaatagggcgttatattgaatcagggctgcagtgttttgtgatcccttttttttatgaaaccctaagcgcgccttattttctgatttccttgtattttgctagccagctcttcagattagtgtagtcaaacaaacaaaaaagtatgggaaatctttaaggaaagagtgaaaccgcggtgaactggaactgtggcagcagccaccacagtttcctgtcgatgcattctagagcgcatcgaagcacgcggcggtgcaagttgcccctactgcagcagaagcttggtaaagagagccagcatgcctctgatgagcacgccttgactttttttttgcaggttcacagtgatccctttcacgtactgaagcccaacttcatgtactgattcgaacatatgcctcaccttctattctccccaacactttcttaccaagtcaccatttcattgtcgtcgatttctcttctcaaaaatgcgctttgtcttgtgggctaccagcgtctttccattcacatgaagcggcgctgata

SEQ ID NO: 199 - DNA, 987 bp, Artificial Sequence
  IrLmxQ
agagggagaggagatgaggaagaacgcctctgcccttccgcccagccgtgatgcaccggtatcacacactagcaggcaggcagagatagaaatgggaagaaggtcacccggcagcgacgtctgatctccttcagcgtcagtcgcctcggccgcttcctccctagaccccccccgccctcccccctcctcctccacctcccactaccaccaccaccactcctcctctctggatagcttataaacggtcacgcgcgcctcatcaatacgcacgcgcagctgccggtggcggggcgcaggatggagcaaggaagcttcatccgctacccctcctcccactccccttttcaccccaccgcgccgttcgggttttgtgctctgtgtctgcatctgtgtgtgtgtgtgtgtgtgtgctttctattggggataaaggcctctgcacattgttcaactattgggctctgcgtgtgagcacgtgtgcgcacgttcctttcttgcctgcctctccctccctccctgcccttcgcgtgtgtgcgtgctctctcatacatattattctggtttcccttctgtgtacctctcctgtgttcttacgaagctgcgcagacctgacgtctcccatcgttgcgctccaccccttctcctcctgctgctgcgcggcccgttggcgtgcacacaagtggtggtgggaggggggggtctgtgtggggtgctcatgtgcgtgacagcgagggcgacggccgttaaaagcgcacgtggtttccgcaacatcgggagccgctcctcctcctcccaccgcctccacaacatgtgcccctgacccgtctctcctctcactcttcccgcctgcacgtctgcctcgtcctgcctcgcctacccaccccacctgtatagcagtgcaccaacacacacgcacgtttcttccctccctgcctctcgccctgctgtcttacttagcagattcccctgcagcgctacagcgcagtcccc

SEQ ID NO: 200 - DNA, 982 bp, Artificial Sequence
  IrLmxR
gaggggtgtcacgctgtttcccgctgctgcagtacgcaaagcgtgtgatgagccgacacgtgacttctcacgttcatcgttgtcgctcatctctgtcattgccggttcaccagttcttcgcgtttactgatagcagcggtgtctctctcattcccttctttctttcggttctcgagattctcctcgcgtagcgtctttacaaagcttaggaagtgccggggaagggggcacgtgtgtgtgtacgtgtggaggtgagtggagtggtgccacgtatatatatatatatatatacatgcccgcaccatctaaggcacagcgaacagaagaagggtgacttccctcgcttttcttctctgattcggtccttctctcttttttttcgagttagtacaaaggcattacttttcatatgaagttcattaacacgcgtagcaccggcaaaaaagaacagcaacaacaaacggctagacgcgtgcaacacacgcgcgggcacgcaatacttttgtggcaatccaaaagcgattgtattagtgccggaggcaccacgggtgcgatactggatgaagtgtagcgaaacaacagtgtacaccgtgtgagatcaccgactgtgcgtgcgaaggcggtgccttcggataagcagcaccggtggagtcgcaggaaaccacctttctccgcaggtgtctttttgttttcgtatgagaatgcgcaaaggcctgctggcgctcttctcaaatatcatgtctttcattgcgcgctcgctttccctttcctctcctttccctctcttccgtggcgccgtgtatgttcctgacacccgctacgtcactttgctggtttgaacagaaccactgtgaacacccacgagcaatcacacccatacgcattcctcacacacacacacacagcaacatctatccaacatacagctgaaaaaagtctacgaacaaaatttttacagtgcgttgccgcacatttctccgta

SEQ ID NO: 201 - DNA, 858 bp, Artificial Sequence
  IrLmxS
agcacacctacccctctctttctctcgctgatagggggaggggtgtacgttgttgtgtgggagcgagacgcacacgcgcacacacgtgttcccctctctccctctccatagatccagtccttttgtttctcgtgttcgttcttcggtgtcatctgtgtctagctctcaccagggggttagtaaaggttgccgtttgaaaacttatttttgtgtccaagaacgaaacccctcccgtgcgagctcatgttgcctgtagtgggagtgtgtgcgggtttgatgaagttccctggagctgcacaatctgtgttcatctttccacacacacacacacacgcacacgcagagcctcctctcctcctcctgcagttttccttgatgctatttgcgtgtgtgtgtgcgtgtatggcgggggtgcacgtgacgtgatacacgaagctttccaccggttgacatagttgttcttcgcttcttgacagctgtgatcattctgactcgtgtaaccagctatcacagctccttggtgacctggtcgtgtaagccgcgtcatctctactcccttctcccttctcccttcgcccaccccggtcccaccccctccttgctctctgattccactatgcccttcagttgggctcttgctgcttacgcagacgttgcacgaatacgcacactgtgtggctggtcagcggcagtgcttgctgcattagacgttcacatctcttcctctcttccacccttcctgtcctgcggcgccgtgtgtgtgtgtgtgtgctcggggtgtacacccttctgtgaaacggcgctcaccggcaaagtgcatcacgtgcgtacttcttcgctctttcacgcgccgctgtc

SEQ ID NO: 202 - DNA, 976 bp, Artificial Sequence
  IrLmxT
aggagctaggcggactctagctctacccctcccccctccccctctatctctatgtgtctcttagatttctgtcggaggcagtggaggttatgaacccccccccggctcatctcctccgggagagggagaagcacggggcctctgcacaggacagcagcgcgcacacgcgcagatgtctgcatgtgtattgggtgcgtgtggcaggcagcgcgtgtgcgtccatgctgccgcgcacgccgtatcatagatccacctctgtctttatatatatatatatatataccatggaaagaggagagaggaataggttcggcgtaatctgtgtgtgtgtgtgtgcgcgcgcgtcctcgatctctgtggcctggcgatggcgtgcttgagggggccgtccctgggtgcgatggacggcgtcctcctcacgctgcatcctcgccggaggctgaggagaaaacacagatgacgcaaaggtagcgagcaaggagcggaacgtcccacgcagtgcgcgcgcgtataggtggatgcctgtctgcacgattcgtgcatgtgcgtgtgccgcgcaggtaggaaatggcgcaccggcggtgctgccgctgccttccgcccacctcatcgaagcgaccccgtcgccagcacgcagggacgtctgtgctgccctgacctcaacatcctttttaaccgctcagcagcaacatcagggtgacgcggtggatgtgcacgccgccagtctccatcacttcctcgccccctcccctcccccgctccaacccactcacccacccctaccccctctccctctccttcccgtaacattcgaatgcgcgcatgtgcgcagtgcatcctcagcgcagtccacacgccatctttctcccccaccgtcctcaccccctttccatccagaccagagaaggagtcttagccacgtcggccaccgtacccgagcacaagcaggcctgcaacacgaccaccgcttgtcatc

SEQ ID NO: 203 - DNA, 972 bp, Artificial Sequence
  IrLmxU
cggacggagtgcgctcacggaaaagagacccattcatactttttttttacatcgtttctttgattatacattttgcttcagcttttggaactcattgttggtaccggttgcacgctggagttgtagttttattgcttgtgcttgcctgcgcccaatcaaggtggtgcaatcagctgtctcactttagtttttctttttacgtgttttttctcttctctcttctcccctcatatttcttcctcttttttgcccctctgtgaaaacccactcttcatatattacgaggttagtgccacctacactatttttttagactgtctccgtctccttttttgcccatctgcatgcatgcgtgatggttcttcgtatgttatgcaaaggtgagtaccattcggtctttctatgcaattcatgtgatgagctacataggtcacctcgccggcggtcattaagtgcaaaagaacagggatgacctgtactgtatgcgcgaagcagtacattctcggagctgctgagggctgtagcaggtaatcgttgcgtgctgagcgttttttttttcatcgttggcatgaatatatatctatatataggtagatatatatatatacttcttttgccctcttctcctttttacgcggtctacctccttttggttgtaaaaaaaactatgtgtgtatctcttgagagaaaaaagatatggcaatagaagtatgacaaaactgcatgttatggtcatcagtgatgcccgcagcctccacccctagtgaggaactgtgctggtgggcgaactcgtggcggttcattgacagcagccatgcaaaactggtccaaaggccgcagcgatgctgaaactcatgtgattctggcttatatattgacttctctccgcccatcctgtcatttaccttgttcatatcatttgcttttctgctgtcacttagagtagatctagtagttttcccgtcttgtgcg

SEQ ID NO: 204 - DNA, 693 bp, Artificial Sequence
  IrLmxV
ccagcgcggcattcgcgctttccctcctccctgtttgtttttcgctcactcctccccctccccactgacttcgttctgctgggtaaaccgcagcaccgctgccattctcatgtgtgctgtttccttggcttatctcattccgcgtgcgtgtgcgtgtgcgtgtgcgtgtgcgtgtggcgcctcccctcagcccatacgggagctggttcctgggccgcggtctacgcggggaccccacacacgcacgcgcgcacccccgccccgccgccgcatgaagcctgtgcaccacccatgtgagcacgctttctctgtttccgttcttcctcttcttttgctgcgggggccgtgctgtcgctgcgcatacagccggcagcgcgcaccgccctccctccaatgtgtacagcccattcgcagtcctagccgcccctccccccactcgcacaagcacgcatatcttgaccgccaacgtcctccccccccccctcccctcccgctgcgctgcgctgcagacgcggtcgcgtcacacccgcccgtcgcactcccctccctgcatctgcctactattgcacggcccctctcctccctctcccctgccactcctcgccccgcctccctgtccccttcctcctctgcgccgcaccgctccacgcagcagcccatttgcccccgcaccgcaccccctccagaccacca

SEQ ID NO: 205 - DNA, 926 bp, Artificial Sequence
  IrLmxW
gtcgctgagggctgctttgtgtgcgcgttgcaccgtcaggtcaagcgacacggtgggagggaggaaggggggtgacggagaagctggagagaggcctcggagcaggagcgggtgtggttccatcacccaccagcgcttggcgcttctcttcaccttgtgacgtgtgcgtgtgacacgtcggacttcgccaatttcctgtgtcttatgtaccgctactgtggggagtggggtacaccggtggtggccccccttcactgcctccctccctggcactcaaggccactcagacgaacaccccacaccgagcggtgtcggtaaacatggaagtgaggggggtgccgtgcatatacctggcatgcgtccgtgtccgctctactctcgcctcccctttcctgtcgcacggatgagccttttgcgcgacgttgtgggatgggggagcgcgcagggaatggctggcatacgcgtgcacacgcatgcatgtcctgccgcggagtgacgtacacaggcgcaggcggaggcagacatccggtagccccaaaggcaaagccactgcattctgtcgtgtgttctccttctgtgaacttgcggtccgtgcccagcagcccgtcatcgccctccgccaccccctcaaagtcgccaccccttctccttcacctctccctctctaggtataaatatatatatatatatatatgcgtatacacgtatgtgtggacaggcctctctgtgccccgcctccaccccctaccgaccccacccacccacccccatccctcccctctccaaacctcttcgactcccccctctctctccccccaaagtaacatgagcgcctgagcataagagtgcaaagctctcgctgccgccccgtcccccacgctgcggctcgtgtcagtgctcacgagtctccgtagtagcgggtggtg

SEQ ID NO: 206 - DNA, 640 bp, Artificial Sequence
  IrLmxX
tgctttctggtttggctttcgtcaagcattgaggccgtcgtgctgttggttcgatcggttagtgcgatgacatgtatttgaaagcacttcttcgttgaagcggtgtgtgtgtcactctattgtttcttgcctcttccctcctttggtcggaaatgcaattgttcgttgctgtgcatctcttggtctcgagggagtgttttcatgaaaacggctgaagctcttactcgagttcgagcttttgtccgtgtacaaggtgttttgccagaggggcggcgcatcatgttttattgttcccttggtttcatttccttccgggactggacgtaagatacatgcgcgaactagcggctacaggatgacaaacaaagaaaccgagtaagtgttctttctcataaaatgatgaaaggggggggggtcttgttgcgactggcgcctgccgctcaccttttcctctcatcggtcttttttcgtgactctgggttttcatgagaccgagttcgcggagcgtatggcggctgtttctccgtgcgactgcatgagccgcaacatctcgaagcgtgcccaatctttgttactgctctcacctcctttttttcctaacatcaacactgacgctttcttttagatttcgcctgataga

SEQ ID NO: 207 - DNA, 661 bp, Artificial Sequence
  IrLmxY
ggtgcccgggcgctctttattttcaagggattcaattgtgctttttgaacttatttcacatctaaaaaaccaacaaaaaagaacgtgcatgggagcagcatgtggttttaagcaatcgtagacgtaggtgcagcgacactctagctctgggtgtcatcgcacttctactataagcgccggtgtctctgtgtgagtgttgcctccgaagcagatcttcgcaccgactcttttccacccgaatgcccttcaatttgtttggtggaagatgtggccaggctcgcgcgtaatgcaaatttcaccgctcctcctagtgcccattctcaacaaattttcctcgcgtctctgaaacctaaattgatgtgctcttcctttctactgcattatcccataacgacgccgaaaaaggaaacacgaagatacacgttgtctgggagaaaatcagaggcgacgacaaagagcctgaggatccaagtgagcggcgacgctgtgttttcacgaagtaggggtgagcctaccgagtagttgtatttagttcaaagggagaaagcaagtaaacgcataattaaatccgtgacacacactcgcaagcacacgcagtcgctgcacggcacgaaaaacggatatatcagtgtagctgtggggactgtgtgtgttggcgaaa

SEQ ID NO: 208 - DNA, 523 bp, Artificial Sequence
  IrLmxZ
gcagccgccgcactgggccgcgtcacccgcctcttgccgcagacttccatgcggacctgttctcattgttgtgccgcgtcgcttctttctttgcttgtctctttgttttttcgttttatttggaccggaaagagtctgcaaatcggacacacgatgcggggtgagtggatagaagggggtgggaggatgtgaggtggctgcttatgaggctgtcatcagaaaaagaaatagaggcgccctccctcctccgtttcttctctcctcgtagatgagagagccgaaaagtgccaaggacactgcaccagcgtcactagcggtgccatgaagagaggaaactgcgcttttctgccgtgaccccctgccttagatgagcgagagaaggtctcatctcacaatgccgtcatgacgccatgcttttctcttattcctccctggtcttcttgcttccttctcgtttttttcctttccatgcactttctcccgtaatgtttttgcctcttctcgtacaagaggtgtagtcaag

SEQ ID NO: 209 - DNA, 598 bp, Artificial Sequence
  IrLmxAA
gcggcgatggctgtgcggacacggcacgcatgcgcggccacccgcttgtgtgtgcccgcacgcgccgcaccctcctctggcaatgtcctttcgtttttctcatttatggtttagcacttccctaacggagaatgcacgattagctgcactgggccgctccttctgagcgcgcagcgagaaaaggaaggcgccaccgaagcgttcgcgcactttgcgctacccactaacgactctgcgccgtgctggcgactcggctgcgtaagtggcgagtcgagccgcagcgcccccccccccacccgctgtcgtgtgaggtgtgcaaggccacattctctccccgcatctccaccgcgcatccgcccatctctcgctctctgcctccgcctgcgccctgttctcttgcacctgctccgagcgccacagacgctgaccacacaagcccaccccctcccctctccacccgcacggacacattctttcgtctttcctctcgtctatcgcctatcgaccgccatcgcgcgttgccatcctccgctccgcacagacgctctctctccctctgtgtgctcccgctgtctcttcttgctgaaccctcgccacc

SEQ ID NO: 210 - DNA, 924 bp, Artificial Sequence
  IrLmxAB
gcgcgggatcccttcggcctttgcggaggttgctgctctggcagacatgtgtgcctctcttcagtgatttgtttttgatggggcagtggtgtgcagggcctgcgagaatccgagctgaacaacgatggtgactgaccacacccactgtttgtgtcgccgtcgcgccatcggagcgtgtagtgcacaggggagggtggaatgcgagtgcttgtgcctctgttggtgcccaccattgatcagctacatatgtacggtagggtgtgggcgaagggacggcggccgctacagcggtttgtcttgtctttttttgttctgcgtgccgttttctcgcactgttgccgtttatttctctgtgatgtgacgtcttcttctggcagcgccagcgaggagggggtgatgatgaaatgggtggcacagcagacaacgaaatgaagtggaatcgcgcaggctcttcaacgtgcaatggcgacaccgctccgccgtctctctcgcttttcacccctttccttctgtgggctttcattggttttcttctgtcaaacgacaacgagggagctggatagacagatagcagtgacaagcgccacccatcgtgccgcacaggagaccggcatgcgtgcctcctcggtttctgatgcaaagcaggcatgccggcatggggaaagggcttgtgatgtgaatctccttcgttactggatgcctaggactgacacgatcatgctggtttctatctctctttccgcttccgtcttggtccgtgattttggcgtccttctctcccacatactgtgcgcctgacgccaaccgctacttgccattcttagaattgcacgtcgtcgacgaagacgttgcagagcctgcgctggcagaggacacctgctcgctttctagcctcgccactacagcggtggtggtggtgttccg

SEQ ID NO: 211 - DNA, 742 bp, Artificial Sequence
  IrLmxAC
gcaccggatacccgtacgcgctctcgcagcacgtactcgtgttgtagcctcgctacctctacagcctctctggtgaggcgcgtgccgacgtgtttctcggttctcccgcaggcgtgggcgtcttttctattttttggtttcttcgctttcctttaaaaaaaaatcacccgcaaagaacgcaacaagtgaacatgtccgcgcatgcgcaaccagatgcgatcctcgctctcatgcagcccatcactcgcgagtcatggggcgtatgtattcgttgctttagtcgggtcttccacgtgtgcagctgtggactcgcacacggtagctgcatggccggtgcgggccctttggtgcctgattacgcccccccccccaaccccagcacgcgggcgcgggcgtggactttgcaaacgcctgcaaggctgctgtggtggtgggcaggtagaggtgctgtgatggcggctaatgcgtgccattgcaggcacgtctcttttccatttttttcttctgttgcgctgccatccctcctccctcgtctctctgcgctttgcgtgcgtgtttccgtgaccgtgcctgcgtggtgcgagctgattcgcgcttgtttcttgtgtctcggtgatggcaacgacgccgcacacgcgccggaaagcttactcgtgcatctgctcgcacacacacacgcacacacgcgcaagtggatgtcccccctccccattcacacaagcaaaacggaagtcgattattc

SEQ ID NO: 212 - DNA, 869 bp, Artificial Sequence
  IrLmxAD
gcatgccagcgcacgcacgtcttgttgtgtgcgtctgcctctctgcgtgaccttctcgtgtctgccagggtcgcagcgcgtccgcctcttcctacggccgtgcttgttctcttcgtctccgcgtctatgtcgctcgtgtgcttgccagcggaggcagcggtgcggagtgtgtggatgtggatggctctagtgatgacggaacactctgcttcgatagcggtgccaatttctgcgcgtcccttgacgagtggggcctcgggtgctaatgtgaagctcatttcctgatttctttaacgtattttcgattttctttcccagcacaaagagaaaacggaagagaaggatgggtgcggagaggcatcggaactgacgtgttgtgtgtgctcgggcagatccgcggcatgggctagtttcacggccggcgatgtcagcgtccagccagcacatgccacagaaacgcagtttcagtgctgaatggctcgttacggtgtcgagcacccttcctttgctcctcgtcgttttgcgtggagacaacagctcgtgttaacgtatgtcactggggtctctcacggttccccctcaaccaccactgcctgtagacgatgaacatgcagcccaaaattacgcgcacagcaggtcttctagctgtgtggcgagctccatgaaccgtatccacgttacgtttttttttctcgtgggtggcggtaaactgcgtggctgcctcaatcacgacttccacttccttccctccctttctccctctcaaccgtctgctgtggtgtttttgtttcttctcctcacacatcattcctgcggacactgtgttgtctatccttagcattcaacggtctctctctccatcggcagcc

SEQ ID NO: 213 - DNA, 810 bp, Artificial Sequence
  IrLmxAE
tagaacaacccaaacttctttacggcatgcgcccgattccgaaccttttctcacagctgtgacctgccacagcaccaacgagccgcaaccgcgacaacgacaacaagaagacgtgacgggctgctgaaccctgtcttcaccccggtacatacatgtgtgtgtgtgcgtatgcgtgtattcgttcgcatgtgaatttctttatgtatgtatgcatgttcatctcttcttgttttcgtgcgcctgtgtgtgtgtgtgtgcacgtgtctgacacctcttccccccccccccaaggcgttgctcgctcgaagcgcaaacgtaaacggggggggggaacgaaacgcaaaaaaaagaaaagaaaaaaaacggtccaggaagagaggtgaatagtggaggagctgtaatgtcgaggcagtgactgccgaaaactctacgtgcgccactagggaataccgccgctcatgcgggtctgccgtgggcacaactatggtatctgcttctctcccacgcctcgttgctgtctttcacgtgctcgtcgataagcgtaaaaaagaaaagcacgcacctcctcacccactgcggtgtcttgtcgggtgtgttatctttgagcttgaggggctgggaaagggtttagtcaggtgcgatcaaaacctgcaagggcgtttgcacaggctccatctttgttggttacggagttgttcagagtatcacacgcggcgtctcgcgtcttgttctactcgtctgcccgtgtgcaagcacacacacacacacacacacagaaacacacggtggcacatacaacattttccttcc

SEQ ID NO: 214 - DNA, 918 bp, Artificial Sequence
  IrLmxAF
gcgaaggcagccgctgatgggatgggcggaggatgtcgtgaagcctttccgcgcgtcgtttcgcccgcgacaggaaaaaggccacatcggtccacacagtgatcggagccgatgcgtttctctttccggttgttgtttttcatttttctccgttacgagccaaagacatacaaagcgcagcagtagcacccgtgtctcgctgagcaccagagaaggggactgcggaggcggtctctgtgaggactctgagcacctttgtgcgcgtggctgccgacgtacactgcgcacgtgagagatgacgcgagtcttcagaaggttcgcggacaggctgccctcgccgtcactcacgtgacgccggaaataggggacaggtgaagaagacggcgatctcctcagcggtgcggtgtcgacggcaccagctggcgcgcccatcttcgcctcgttcccggtttgttatcagcgtgtctgccgtgtccacgctcattcactttggggagctgctatctcgacgccaaaacgccgtgcgtcttgcgcaccctgcatgccaagttccctgttgccccctccctctcgccccctctctccctttcctgaccttcgtccgtttctgtgtgccatgttcgtggctttctctctacattggtgcgcacatgagtgcgcacgcatgccgcactactcgcccacctatgtgacgtggcgtcactctccaccacattccgactcgcctccgctgcttgtctcaccactctcaccctcctgagaagcgcagccacttcggcgcgtagtactctcgccaaacagtgttctgtccttccgctcatcccgtaacacgcacacaggcaggcactttgggccgtcagagggggtcgtcgctcatagacgtggattccggaaagcagcagcggatcccctcttggc

SEQ ID NO: 215 - DNA, 925 bp, Artificial Sequence
  IrLmxAG
atggaacaggcacattacaatggaaatgcactctctgccataagtgacctacttcctccttttttttggcttccgtttttattcttactccgtctctcgtcgtttttgtctgtgttattcatgtaccgttccatgtctcgtgtgcgcaatgttggcgttggggttggcagcttttttttctcgttttcgctaacagaatgcaaacagagagacatcagaactgctgaagaaggcagcaatgaggatgaacagacgtgatgtagacggtgcgcagtcgcgatcatgtgatctttcggacggacagaagattggtagcatcgaagcagctgcctcttcccctctaaaagacacacacacacacacacaaagatgcgcggtctatgcagctcaagctacatgctcccttgtgtaaagcctccactgaaggcaggctatgcgcgcacattcaggcaatcatagcgagctttgtacgcagtggattggaggccattgcacttctgtctcttggattatgtgtgcttgagcttctctgtgcccgatcaccggggcccgtgtgcccgcacctcttctgttctttctgtaaacctcttcctcttttcttttcgtcgttactattttttttttgatatttcgctgctttccatatcgctctactgtgctctcaccacgacggtgttcatgcgtgaaggcaagcagtgtccgtggcgcgacttcaggcatcctctgaagccttccgcgcgttaatcgaggaaccaccttccgctgcgttttcatccacctacgcggtgcccatcgcaggcaactagagaacgttcgcctctagccaaggctcaacaccgcgctcgcacacaaaggcacacctacataaagaaacctagatagatttgttcacaggtacgggcagctacactgtagtcttgacgcc

SEQ ID NO: 216 - DNA, 608 bp, Artificial Sequence
  IrLmxAH
gctgcggactaacgggtttacttgctctgtcatctggcaggcggcctgaacatgtttaagtatgccccgtaatgttaatatgctttcttctgaggggttttctgtgtgtgcttgttttccgtttgttttgaggggccttttggtcgacttttcatcttgacgcggggtgcttctccgctcttctggagtttttgtgttcctctggcgctggataaaaaaagagctgtggtgcgtcgcgtatcgacggtgaggtgtattgatgcgggatctttgtgtggagttgcttatactgtttagcaccgatctctgccctttcttaggcgcagtgacatgccaggtacgcgttctggtttttttttgcctgtcacctctggtgagaaatctattgggctgtacctgacatctgcctccatgtcttgctcttacactgctcgtgttcgtgtgtcttcttgttttttttgttcttgagctggtgcatcgctcctcctcccggcgcttggttagttgcgcaagtgacgggacgcggggggtactgaagttctccattttgtgctgctttctgtacttttgcgtatcgaaagtgtgcagaggcactcgaatgaatcgag

SEQ ID NO: 217 - DNA, 758 bp, Artificial Sequence
  IrLmxAI
agctccgccggtgttcgtccttctcgatgcatagtccaatgaccgtccactgacgctgccatccgtgtgcgatgtttcgagtgtactctacctgcccttcgttgtgtttctttttgttttcgtttttgagtaacgttttcatgcaaagaaaaaaaacaaaaggagaagagccacgctctcgtgtcgaacttgtggagaatgggggagaggctgaccactgtctgtgccgtgtgtgcatcatgtacttcatgatgggcaccgttgatcatatatgagcgttgtttcgcgcgtcgcatgggcggttggtgcgctatcccgcacgacgtcacgcaccatgtagtgtttttttttggtgttcgcctggtgtttgttgcaatgctccaacgtttgcggatgcccgtctctgtgacgctgagccgtgctccatctcgaaaagcgaagcctgcgctggccgccaaccaccttgccctacgtcgtgtatgcatctcacgttttcttctcactgacattccatcgatacccctccccctcccttctttgcttctgctgatggccgcgctttctcatctagagtgctgtcgttgctgcctgaacagctcgacagctgcttgacactaccagattagaaagaaaaacacttttatgcagagcatagagagagtgcgtgtcgtcgcactgtgtcatgagcttcagctcaggactcttcgctgacatcattaccgctgatttgcaaaagtgtggtggcttccgcggatgag

SEQ ID NO: 218 - DNA, 684 bp, Artificial Sequence
  IrLmxAJ
tgccgttaagcaggagcggtgtatctgctgctcattacattaatggcgccccccctcccccaggactgcacccgttggtatgtcattgctttcgtgatttgtcttgcttctatttcaaaaataaaaaaataaaaactaagccgaacgcaacagagcgaatcgtcctctctcctccccgatgaacgcaggacggtgctgcattggtgccatgcgcggcgacggcgtccgagatatgggagggtgggtgagcggagccgcctcaaaaagaaggcagcactgtgggagacgtgatgagaggaaagaggtacgtgatggtgtaggagacacatacgagtgtctcggcatcgcctcaccttcttctcttcctcctttcccatcaatctattgagaaaaagggggtggttgggggcgtcgatagtggcggagtatccactgctacctaatgcgcgtgtgccacctcgccctcccttcaacctgctcgtctctcctttctttgactgccggccgaacgcgctgctaaacctcgtctcctctttcttcccaccatgtgcactttcctttttttttctgtctgacgtgccaccgcatttctccgccccgcacacgaaattccgcgcacggctaaaccaataaaacgcacaaaaaacgtcagtaggcttttcgagcttctgtgtgagcaccacc

SEQ ID NO: 219 - DNA, 848 bp, Artificial Sequence
  IrLmxAK
gactgcaatggatgtggcgtttataggctgccctgccatcccttgttgttactatcaaggtttagtctttctatatatatgtatatatgtatatatatacatatatatatatatgtggaggatgacaacagcgggcgagcacttccttctttattcactctctcttttgctttcctcgtcttgacgtctgtacatgcgctctgtcgacgtttttttttgtgcgccttgcgctctatccagcaacattcatcggaaaagagtagtgaaagcagacaatgggtgcgctgactgccgttggattggcacagttttgaaaagaaaaaaatcggagaacggacagaatagggaaatcagcactacgacgaggacgtgcgtctttactctgtcggttattaaattcttgggctttgtaacactgaaggaaatcgcacacgaatgaaaagtatgttcgactgccaatgccaatacggtgtatcgagcgtgctttctgtattgcagactgggaagctacggcacttgcgtggtgctgctgtgtgattgggacgacgggctgtggcagtcaacattatctgcccctggcgctcatcgtatgccttcagccaaagcgcggttactctcaactgcgcgagatggaactgctgatccatgagaacgacacccgtcttctctgcaatgcccccccccctccctctccccgatgtttgttgccatgctttctgtgccattcttctactttcccatttctcttccgttgttttgttctttctggttttcctttgcctgtacacgggcgcgctgatgattgggtaacacggttctgcgagcgtgtgcactaggcggctgcaaaa

SEQ ID NO: 220 - DNA, 967 bp, Artificial Sequence
  IrLiA
gcggtcattacgatgatgagagaatacgtggtcgggggaaggaagaggacagtggtactctgcatgtgcttgggcaccgtgtcttttggacgagtagacggtgccaggtgggggaagggggaagggagtttgggcgatgaggtagtcgaggcacagcacacgttcatgtggctgtctgcatgtagaatatgccgatgtcggtgagctcagctctcgcaggcgcataccctacattggcccgctgccgcgcgtgtgctgcccattctctccacctcacctccactcgtatcgttgcctcatctctgagcgggtcgcctgcgctccttcttccgcccctccccttcgccgtctccatcagtcaagtccatcggaccgccgcgaagtctggctgctgttcgttggtgcatttcgggcagcgacggtgtggcgtgggtgtgtgtctctcgggcacacggcacgcatacgagagcgtgatggagagttcgctggatagtgtgcatacatgcatgcatactggagtacttttcgtcccaccaccctccgcgtacacgcgtatcgatgcctgcgcgtgcgtgtgtgggggcttctctcttacacgttttctttgttttttttttggtttcctcgtttcttctttcaacggtacaccgccatgaaaagaaacaacaccagacgcgagagcatcccgccgctgcattggcgacccgatgctaacgaggatgatgatgcggatggaaagggagggggaggaggaagaggagatgatcgttcatgacggccgacatggaagttgggcgaaggaaggaagaaaggcgggacgcgcgtaaacgcacacgtccatccttctctttctctgtgtatgtatgtgtgtgtgtgtgtgcccaacgcgtagaaccccatcatcacctccaacttcccccccccacccacccacccacccgcctcttctttccattttgatgctgcg

SEQ ID NO: 221 - DNA, 910 bp, Artificial Sequence
  IrLiB
gctctcgcagcagcgtgaaacgcgtggggaaacgggtgcgtgcgtctgtgtgtgcgtgttcaaatggcatccgcagcgtgccgcgcgcacccgtgcccgagcacctctgggatgaacgacctctctcgtcgattgaacgcgatgtcaccaatggcagtcatcttttttcccccttttttcacgggcgctctgtggcgtgcgcctttcatttcttgttttgacccctcggcaaagaaccaaaagaagcaggggtcggccgtgtagcaggcacccacccgctccgcctccgtcccctctcgcacgcaccgcctcaagacgcggtgcatcgcctgcgcgccgtcttgcgcacacaactgcgttctgttgtcacggctgttccttgcgcgcgcgcgcgtgcgtcgttgacgactctctccgacgcaccaccgatgagcaccctctggatgagggcacgcacgtatgtatacacgcatgttgtgtgcctatgcacgtatgtatgctcctgcgcagtctctctcgcctcgcctcttacgtcattgcttcgccctcgccatacctgcagcggtgcgtgcgtgtattgtgtaagttttcgcacgcgagcggagagctgctacgcagcagcgacgcagtcgagtgcgtgactacgctggcacaccggcgctaactagcgtgtttgccccaccaacaccaacaacaccctaagccttggcgcacccttctccatagacacacgcacaggccacataagccgttgcgcgcatcttctccggaggccggtgagcgcctcttgttgttgtgtcttccgatctccctctctcatccattcaacagatccgcaaacctcgcatactgcgcgcgcacgctcatcacggtactggcagcaacagcaacggtgaccgcgagcgaggcc

SEQ ID NO: 222 - DNA, 599 bp, Artificial Sequence
  IrLiC
ggaggtggtcattccatgattatcttggtttccttcattttttttatgcgtgtgcttactttaaaaaagaagcaaagaagtagtcagtagaatcagtacgaccacgtcgggaactgacacgcgccgtgacggatttcggctatgtttgtggagcacacctgtaggggaaaaaaggacatctctccgcaggcacaccggcgatttccctcgacagcgttcagtgaaccccctggcgagtctcgttgaaaccacaggcacgtcctagacgcgttgggtcccttcgacgagaagctctctctctcattccctgcaactcatcctctgtgacttctcttacttgtttttattctcaccgggccgcccccccccccctcacactcccccttccctctctccctgaggatggcaaaagcgcttaacaagcaaacggcatccaagcctctcctccgcacggcagttatcctggaaggaacggggccgtaccttgacctaagacactcatacacggtgcagggcgttgcgtagaagggctgttgaacaaggcgggttcaacccggtcacaccgttgtgtcgccgctgtagacgccctggtagaggcg

SEQ ID NO: 223 - DNA, 958 bp, Artificial Sequence
  IrLiD
ggtacactcgtgccgcgcgctgatgttgtaggtgcacgcgcgcgtgtgctgcagcggggccgccgccactgcgactgtgtgtgtgcgcgtgacggccggcacgaggaaggaggagcgcgcgtgtgcgtgcgatgcgcctcctcttttttttttcgccctcgtcggtgttttttttttctgagaggacggcggggcggatggcgggcggcggtgctgacggagcggccacactttgcacctccccgccctccgccgtctctccgttcgccgtcctctccttcctcgtgcgtgcgtctgccgcgcatgcacacgcgcgcgcgttgccgtagcgctgtgtatctgtggaggggggccttgtctctccctccccgtggttgatagatgaagagaaagaaaaggagagagcagtgcgcatgtgcgcgcgtgtgtgcctccgctccctggagctccccacgagtcccctccgccacgcacctgcgagcctgcacagcggcccacccgcccgcacacatgagcagaggtgggtgggtggagcgggtgatgtcggcgcgcacacgcgcgcgcgctgaccactccgacgtgaaaacacggacgagcgaggctggcaaggcaaggcaggaatctgatcacgtgcgcgcgcacacaaacggaatgagcagctcctgaagagacgatggggctcatgcacacagacacgcacgcgcacactcctccgtcttcacggagcgcggccctgctgctgctgctgctgccgccatgtgccggacgtctgccacgcgtgtcttccccacaccttgctctttccctcccccctcccctcccctcctggcgaacacaaaacatgcgcgatgcacacacgcgcacgcccaccgaaaaaaaaacgcgcagctcttcgctctcgttcttcgaacaaacacctttaaaccgccttctaacccctctttcttctttttcagcc

SEQ ID NO: 224 - DNA, 457 bp, Artificial Sequence
  IrLiE
gcagaatttggatgatgcgattacttgagataatttcattttcatcagcaaaaacgaagtgcaacggtatctttggttcaccagaggccggcaaagctcttagggtggtgtaatgggctgttagcgctacggtacactgaagcgatcagctgcggtatctgtgtgagcgtcaagggtgcgctggtttctgcatctccgagtttttgattcgctctgaggatgtatcgcaaaaagcacgctgcggtgctgctttactactcctgcgctgctgctccttcaaatgcgtcgacatgtccgattttctgcagctactcgcctccactttcatctctccctcttccttgttgttttctgtgtgtccatgcgccttgtgtgcgtctcaacttgcgacaacttttctttcgcgtctctgtggaataacatctgaacagctttagggcttcattcgcaacggatc

SEQ ID NO: 225 - DNA, 910 bp, Artificial Sequence
  IrLiF
gctgccttccactgaagcgcgcacacagaccgacggacacaaccacccctctcttttttcttcccttttttacttttcatttcctctgaagcaaacaagcaaacaaacaacagcaagcgcaacgctgagagtcacagcggggcatcgacctctcacagtcgcggcagcggtgtgaagtgcgcagacgtgcacgacgatgctctcaaatggacggaggattgcttcgtgtgtgtgtttcgcacctcgaaggtgagacagaatgcagagaaaggataggcgaggggccagggacggcgctggagagggtggtcctgtgcgggtgggagggacgaaacagacgcgagttgtcgctttacctcttttcttttcgctctctttccactcacttctgccatgccgtaccttgccgttggtagcttacacacatacacacatcagtgtgcaccccggtccaacgcatcccccttctctgtttttgaagacatggatagctgagaaaacgaacaagcaacacacctctctcaaggttgctccttggctgcaccgcccatgcacccacttctcccctctctgcactttctcttccctctttcatcaccattcagaactctctccgacgctattgtcgatgggataaacaaaccacaaaaaatacgttccctctctgccttcccttccgtgacggttgccttcattctgcatgggcccgcactcaacctcctccaactccactcctacgccctccttcgcctctaccccctttccttctcacacagagagcagctctctgatctcgtggcttcccttcattcccctctttccctactctcctttcgtgtaaaaacttccacggttgctccgcatctgtcggctgctttttgatcttgcaaagaaatcaactccttcagcc

SEQ ID NO: 226 - DNA, 604 bp, Artificial Sequence
  IrLiG
ggccataccctcacttcgcttgtttcgtgatttttcgtgggagtcggtggccctaccaccggtctttcattggcttatttctatccggtctgaaagaggtacaaaggcgaacgcattgtagtgagtaatggtgtcgcaaagggtgatatgagtggggcctatgtacatccctcagaatccacgagggcgggcgtatgtggaagttgtttgcggcatctgtgagtgctcgcgtgtgccgcggtgcgtcggtggcacttgttcgattccccaggcacgcacgcgggagctgtcgatgtggagcgatgaaacgcctacgagaatcgtcgtgtgtctcccccttgacttttgcctgtggagtcttcgtgcgcacgttgcagttgtgaccggatgatgcaaaccgcagcaagtttgacagtcatttgtgggtggcttcttcaaggaccctctcgctttctctcttcctcgcttatcttctttcgcattgcacagtcgtttccacgtggaggggtagtgctttcactgcttcttggggagagtcacaggcgtacatatgtacacatacgcactctgtcgttgtgtttgagaaggaagtggcagaggaaaa

SEQ ID NO: 227 - DNA, 392 bp, Artificial Sequence
  IrLiH
acttttgatggcactgtttttctttacttttatttctctcaaaacatcagaagcagtaatgtaaatattcattttgtttcagcgctcgtgccaaacatcacgcgcttgttcaagaggctatgcgaagtgatcattgccgttttttttttcctcagcgtaagcggtgcatatgctcaaaatgcatgtgcttgtggaaaatcaaggcaactttgcatctcctgttgagagttctagtccagcaatctatccatggccttttcttctttgggatacttttatcgcgatgctttgcgcttcgtctctaccccttctgtatcctacaaaaatatcataacgccgattatgtgctcgatgcgctgcttcgaatagctctgttttcttcatttaacacg

SEQ ID NO: 228 - DNA, 885 bp, Artificial Sequence
  IrLiI
agagggcgtgcctggggagagggagacattggcggcccaggtggtgcgtgtgcgcggatctgcgtgcagaggtgcgcagggcgcgcgctctcgtcttttggtctctttctgttttcgctttatttctgtttttttctccttttcaacagcaagaacagccaccacgcgcaccaagcgaaggtaacgtgagactcggcttgtgggattgcttcggtgcgcggggggggaacggcgaggaggtggggtggtgggtggggacctcccctcatctgcctcctgcgcagcaccccatcactcacgcgcacacagatgagcaagtccgccgacgcactgcaggccacccaactgtgcttcgtgttgctcgtgcatcgatctccctctgtgcaagcgaataggctctcctcagatcagatgtgattttcgttcccctccacatcacttcctcgagcagctgacctttaccatgtcttcgcaggcgatgacggcgcccactaggcctcgccccctccaccgctgttgccaacattgcaactgcttctctgtacttctctgtgtttctcgaactctcttccccctcccccaccgtttccatctccgcgcgtgtgcgcgtcgctgtacactcttcgctggatgccggatcccacgcaaacacacacgcacacacacacacacacatcagacgtgcctcacaaacccgttcgtgctcgaacatcgacagcgcacccagacgtgtggtcttgctcttcttcctttcgctcgttctcagctcttcttcctccttacccagtacgacgagctctgacctcttgtcgtgtgcccgcctgtgtgccatacacctggcacccactcctaaacacgcacttatcacacctccatcgcaacacc

SEQ ID NO: 229 - DNA, 640 bp, Artificial Sequence
  IrLiJ
acccgtgccagcatgtttgtatcctttgcattttattttatatatatatatttttttttcatttgctagtgagggattctcatgcgcgtatacatataaaaagaaaaagccagacggtgagagggcacatctgtgatccttgtgcaccgtttgtggtgcgtgcctgtgcttctctgcgaagccatgtctacggcacgcttctcagacacacgcagtgcagacagcagacggcgaatgctttttcttcctctccgtcttcctcgcgcctgctggatagcgggtggcgcatcgtgttgtcattctcacctctgcttgatagggtcacaggcggccaggaaggcgaaggggggggggaggggcatggaaggtgaagaagcctgcttaacggaggcgccgtgcgtcatgttgatgagatggtggaattttcattgggccggttctatcccgtagtcggtgtcccgaacggctcacctttttttttgctgtcattgttgcgctgctcacgttctccccctccgtttctctcactttgaaggtgtcctcgtcacacatccacttcactcttgccggggagtctgttgggcaacgttcgccgagtaaaacgttttttcgagcctttccatgaggaaaccaaggagta

SEQ ID NO: 230 - DNA, 936 bp, Artificial Sequence
  IrLiK
agagcaattgagcgcgtgcgtgtcggtgttcgggtgtgtttatggtcactgaggagggaggagagaaatgcagggcttcctcctcgtgtgttgctctctgtttcgttctcccttccccgtagcctgctgccgcactctgctcgtcccgtgcgtccagacctctgtagcctttcgattcctttatcttttttgttttaattttcttttttgtccgtatgcttcccagaaacgaaaaaaagaacaagaaaggacgaagtacaagtggatgtgcgccgagagcacgtctgcccccctgtgaaggagcgcagcggatgcgtgctccgctccactcggtcatctctgccgtccctcaggcacggcaggcccaggagagttcaaggagcttgatgctgcattgcaaggcgaatgcgttttttttttcgttcgccctccgccagcggtgctcatgaactgcgatgcactcgagttcccgaaagagcagcgagccactgtttcttcgtcgagagtatcgctgaggcacggcgtgcttgcgattgctcgctctgcaagtgcgcgtgcatggcggctctctttgcagtgctcctctacttttctccctctgttctgcgctgccatgcctccttgtatgcctcggcccacgatcactcacgcctgcgcacaaacgcatactttctttttccactcgttctccacggtgcgccttgattcgcactcgtccaatgactagggcgtgtggagagaagagaaggtacagatagcgccaggaggcggctgagcagggagacacacgctggcacacgtcaacgtatagcgcacacccacgtcccacttctgtacggctgctctcttcctactagttggccatattcagcccttcgttctgcccatagtcccagttatcgaagtgacgctgcatgatatagctgcgagcacaca

SEQ ID NO: 231 - DNA, 965 bp, Artificial Sequence
  IrLiL
gtcgaacgctcacttttgagcacacgactctctacttgtctcccgctctgatgtctctttccttatttctgcgcctgcaggtaaaagaagtgcatccgcatggctgtcttttaacggggacagcgaggcgtgctggcggcaactgtgtgcgcttgtgtgcgcgcacgttacgctgagagaacctcacatttcctttttgtttttactgttaattttctgtatgtccttttctcggcctcttgtcgcgtctgctccccccccgatggggcgctggcgaggcggagaggtcataggttcctcgttataagccagtagcggtgctgcacgggcatgccctatggagggagaaggggtgctgcgtggaaaagggagcgcagtgcgccagaacacaagcgtgcgcgcttgtaggtgcgcacatgtttgctacttttttttctctccgttccgctctggctagtgatcttcgccactgccgagtgggtgttggcctgctgcagagactgcaacattgctcccggtgcgggctgtgtgcggtcatcgcgtgtgcgcagctgcagtgtgcggaggggccgtccaggcacggtcttacttcaatctccgctgctatgggtgcgtcctgatgaaggccctgcctacggatcgcctttctgtaggcgctcttgtccatctctgctgtagctcaactttctgcgcttgtttttcctctttttgttcttcggcatctccgcctttgttggtgactggtactgccttgcgtctccatgaactaaaacaacggctgcatatcttccccttcccttgcggatataaaactcgtacctgtgcgactttctcacgttcgccgcacgctcacggacgttcgacgtccaatcgatgcgcgcatgcgcaccatgacgctttttcgaagtttctacgcctcgccatcgtacagacacttaagctaacaactcgctcacacactcgag

SEQ ID NO: 232 - DNA, 598 bp, Artificial Sequence
  IrLiM
tcagcgctccgtagctcgctgcacatgcggtactgcgttccagagcatcacgcgacgcacagcaacacaaactttctttatctttctcttccattcgaaaaaaaaaaagataacacccacctcacataacgtccataacaagagagcgtgagaggagagtctgctcttcgacttcacaccgcgaatgcggcaacacgtggcttatgcgcaacgcttcttttggcacgtcatgctaaacagaatctctgcgtagggcaaccaggctttcatcgacccgtcgttcgatcctcgctcctccggcattcttgagtcacgacacgaatgcttggctccgtgcgtctgcgagcgtttgtgcgttcctctaaagcaagaacgcggggacacgacgtttatctccgcctcgcgacgcactttctttaccaactacgtgcacttacaaccccccgatctcaaaacctctgctcatcgcatcacttctcattccgtcgttgtgcctctctctaccttcatctcccgcttgtgcttggtttcctaataccgttctcgtgtaatgcctcatcccttttccactacagctctttttttcccctcgccgaag

SEQ ID NO: 233 - DNA, 972 bp, Artificial Sequence
  IrLiN
gcccacaccctccctcctctctgtctctcttagatctctttcaaaggtcgtggtggagatgaacatctcggctcatctcctcccggagagggagaagcactgggcctctgcacgcggcagcggcacgcacacgcgcacatgtctgcgtgtgtaaggggcgtggcaggcagcgtgtgtgcctccacgctgccgcgcacgccgtatcatagatgcacttctgttttttattattttaaatgcgccatgcaaaggggggaggggaatatgttctgcgtaatgtgcgcgcactcgatctctgtgacccggcgatggcgtgcgtgagagagggccgtgcgtgggtgcgatggacggcgtcgtcctcgcactccgtgctggccggcagctgaggagagagcgcagaggacgcaaaggtagcgagcaaggagcggcacgcccacgcagtgcgcgcgcgtataggtggatgcctctctgcgcgatgcgtgcgtgtgcctgtgccgcgcaagtaacgaatgacgcgccagcggtgctgctgccgctgctttccgcccacctcatcgaagcggccccgtcgtcggcacacagggacgtctgcgctgccggccctgcgctgatccgcttgtacgtgcggcgcttcagccctctacgcagcagcggggtgggaggggggtcaaagcatacctgaccccaacctcctttataaccgctcaacagcaacctcaggatgacgcggcagatgtgcgcgccgctggtctccttcactttcgcgccccctgccccaactcacccacccacccccccctcctcctctcctccgccttcccgttaacattcggatgcgcgcatgtgcgcagtgcatcctcagcgcagtccacaccgccatcgttctccccgccacgccccttccacccagaccagagaaagagccgtagccacgtaggccaccgcacccgagcacgaccatcgcgtgtcacc

SEQ ID NO: 234 - DNA, 764 bp, Artificial Sequence
  IrLiO
gctcttcggatcgcagcgagagagtgtacgcacgtgcgtgcgggtgtgtcgcgggcttcgccctttacttttagtttgtgtgcatcgcttcttcattttttaatggcccgcttcgaacgaaagcgaaacaagacgagatggcgtcacgacgagagacagacggacggacagagagaaggaccgcggagggaaggcacagatgtagccgcacctcgaatcgccattcctttcgagccttcatctcgcgctctctcgcctatcatgagcggcgtcaatgcacttgccgcctatttgtcagtgccgtgcctgacgtctgtgtgtgtgtgtgtaccacactcgtcttccgtgtgctcgacagcgggtgaggttgggtaagggcccgatttggtagtatcaggcaatgtccacgttgctcggcaacgtagggccgagataggatatggtagaaacggcatgttgcttgaaggaggtgctctccgccctcccctgcccccgcttccagtcccgactccgctcagtcactgcaccgcaactctcgcatcattgacgcaaacatctcacttccctcggtctcggtctcttttcttgctaacgcacttctgcgtggcgcatcacgcacgcattcatcttcgcacgcgtggccgcgtgtgtatttgtgtgttcgcgcgtcgccccccccctccgcccatctccctaccggtgtcttactgctcctgtgaaagcatacgtatccacgcccctctgtgtgtgtgtctgtgatcgca

SEQ ID NO: 235 - DNA, 559 bp, Artificial Sequence
  IrLiP
ggcacgcagtgtgtgtctcgtttgctccgaattctttttcctttttcgtttttcgtgtttcgcgtgcctctcttttcggcgcatgcgaaaaacagcacagcaatccagcaaacgaacaaagaaaatcatcgatggcgcacgctacgccaaggttgggggtggagcgggggtggcggcaacgccgtgtgcagcagagcagacacccatcgcagaagcccccggtatctgcgtgcatgtgtgttcggtgcacgaccgggtcgtgctgcttgtatgtttggggagggaggggctgcgttgccttcctcacgcctcccatccctccatccctgtcgccttctaggggtcgccgaggcgcgtgcagagacggactctacaggcccaggcgagatggcaacgggcgcacgcacacacgcacgcggagggaggaatgtttgggatgaatcacactgcactgaaacctctcttctaccctcatcagccttcatcttcactcgacacacagacgcgccgctgtcgccaccgcctcagaaaaggcagcaagcacacgtgaaaccctaaa

SEQ ID NO: 236 - DNA, 900 bp, Artificial Sequence
  IrLiQ
atcacacctacccctctctttctctcgctgataggggacagggtgtgtgtgcgttgctgtgtgggagcgagaggtgcacgggtctgcgcgcgtgcactacgtaactggcgcatgacgtcgtcgtctgcctctcgctccctgtgacacacacacacgcatacgtatccccctctctccccctccatagatccagtctttttctttctcttatgttatttcttcgatgtcatctgtgtctcgctctcacccaggggctagtaaaggttgccgtttgaaaccaatttcgtctcaaaaaaaatcccttccgggcgaggtgatgttgcctgtggtgtgtgcgtgtgtgtgaagttcactaaggctgaacaatctgtgttcgtctttccacacacacacacacacaaacagcttcctctcctcctgctgcatttctccttgatgttatttgcgtgtgcgtgtgaataggggcggaggtgcacgtggcgcgatacacgaagctttccactcgtcgacatagttgcccttctctacttgacagctgtgagcattctggttcttgtgacctcctatcatatcgccttggtgacctggtagtctgtgctgttcctctctactcccttctcccatccccacctcacccctccttcctctccgaccgcacgttgcctttctgttgggctcttgatgcttacgcagacgtggcacgaatacgcacattgtatggatgggcagcggtagtgtttgttgcattagacgttcacatatcctattctttctcccacccctgggagtcctgcggcgcggcgtgtatgtgtgtgatgggaggggggaccccttccgtgaaacggtgcacacaggcgaagtgcatcacgtgcgttctttgctcttttaggcaccgctgtc

SEQ ID NO: 237 - DNA, 947 bp, Artificial Sequence
  IrLiR
gtgcaacaggcaccttagaacggaaatgcgctgtctgccgtaagtgacctccctcctcttttgttggtttcagtttttcttctcactccatccctcgtcgtttttgcctgtgctatacatgtaccgttccgtgtctcgtgtgcgcaatgttagcgttgggtttggcagcttttttttctcgttttcgctaagagaatgcaagcagcgaaatgtcagagctgctgaagaaggcaggaatgaggatgaacagacgtgatgcagacggtacgcagtcacgatcatgtgatcttccggacggactgaagattggccgcatcgaaggagctgcctcttcccctctaaaacacacacacacacacacacacacacatgcacatacaacgatgcgcggtcgatgcagttcaagctaaacgctcccttgtgtaacgccttcactgaagacaggctatgcgcgcacattcaggcagtgagagcgacctttgtacggagttcattggaggccattgcacttcttcctcacggcttacgtgtgctggagcttctctccgccgatcaccgggtcccgtgcgcccgcgcgtcttctgtcctctccgtaaacctcttcctctttcctttgaaccatttctgtgtttttttttctttggaaatttcaactctttccatatctctctactgcgcactcatcacgacggtgctcatgcacgaagacaagcagtgtgcgcggcgcgacttcacgaatccgctgaagccttccgcgcgtcaatcgaggaaacaccgtactctgcgttttcatccacccacgcggtgcccattccgggcaactagagaacttttgcctcttaccagggctcaacaccgcactcgcacacagacgcacacccacccaaaaaaaaaacctagatagattcgctcacaggtacgggcagctgcgctgcagtcttggcgcc

SEQ ID NO: 238 - DNA, 606 bp, Artificial Sequence
  IrLiS
gctacgggggaacggttgcccttgctgtggcagctgacgtgtggagtttgcgtgttgaaactcattaaggctttcgatcctgttcttttttttttggtgtgcggtggtttatgtgcttgttatgatggtagctttgcggactgttttccttgccgtctgtaggtgtttcttttgttttttttttatagtatttgtgttccactttcgcttgatggaaaagaatttgttggtgcgctgcgcatcgtggttatgttttttgagtctggagccgtggatgctgctgattctactcgtttgtaccttgctgttttcggtgccgtggtgtgccaggtacgcgttctatggtttcttgcgtctcaccgcttgagagagacctagcgggttttcctgacatcctctatcatgtcctgctcttctcctgcacgtgctggtgtgtctttttcttgtttttttttttttttgtgtggagcttgtgcatcgctcctaatcctggcgcttggatagctgcgcgtctcccggtcgcgggggtgtagagattctctgttttgcgctgctttctttgcttttgcatatgcaaatcgtgcagaggcacacgaatgagtcgag

SEQ ID NO: 239 - DNA, 734 bp, Artificial Sequence
  IrLiT
agctgtgccgatgctcgtccttttgatgcatattgcaatggccgcccgctgtcgctagcatgcgggcgcggactttgcggtgtgctgcaactgcccttggttgtgtttcgttttgtttttgtctttgagtagcatttgcaagcaagcaaagaaaaaaaaaggagccacgctgccgtgatgaacttgtggcaaatgagggagcagctggccgccttctgcgccgtgtgtgtgcttcacgtactccactatgggcaccgctggtcatgtccgtgttgttgcgcgcgtcgcatgtgcggctggtacgttataccgaacgacgccacgcaacatacatgtatttgggttttctgctgtttgctggaatgcttgaacgtttgcggatgcctttcagtgtgaagctgggcagtgtttcgtctcgcacagcgaggcctgcgctgtgcgccaccaccttgccctatgtcgcatatgtgtgttttgttttctttgcacagacattgaatcgacatccgcttctctgcttcttctgatggtcgtgctttcccagctgcagtgctgccgctgctgcctgagcagctcgacggctgcttgtcactgctagattttaaaagaaacacttttatgcagagcacataaagagtgcgtaccgtcgcactgtgtcatgagcttcggctcaggaatcttcgctggcatcgttatcgctggctagccaaggtgtggaggcttcggtggatgag

SEQ ID NO: 240 - DNA, 32110 bp, Artificial Sequence
  PacBio raw subread
tgtatgtgtttgggatgttgacgctgtcattttctccgcccccacttgcatagatgcggaagaaaggcgtccgaaaggtgagggagagacacgccggatcaaccacatcacgacacccacacacaaacacacaccgagagcggggggggggggggggggggcctcactcgataaagctaactgtttgttggacataattcccttttggtttcatagttttcctcgtaaaggagcacgataagcttttggattccacagcactctaaaacaaggaaaatgaggcacgttatcctctgcgagtctctctctctctattttcacacccacaggcacaaattttgcagtgtcctcctcctcttcgtgtgccgcgtggtttgtggtgtatgtgtgtgggtccttccgacaagaaaaaacatgaacgctcaagaaacggaatgtcagcggtgtcataggtaccgttgtagtcacacaggcgagcggctccgcgaatctgaccgaactggtggctgaggaacaccacaaggtacaagaaagctaaactgaaccagaaatgcggctccgagtaccgatccacttcttttgcctccctcctctccctctacactataccactctgtcggctgaaagggaaatattatgctccactgtgcccccttcttcatcgcgcgcctggtctttactcggcctccgttaaaacggaactgctgtctcagcatcagcactcaagcgtagagagtttaggcgcgactgcggcactgcttgccgcaacctcagcgcactactcgaaatccctgaacttggaactaagcgcgtcgctgtgtctcgtgaccccctccatctgtgcctaaattcgctgtttcgggattttggttgttcactacgcatcaccagtaaaggcttacaaaggtgtatcgcattagcgttaacctctgacgctttatacatcttcggcttttcagtcacctcatacacccatagaagccacctttaatcgaccggcggggcctcttccactttttgtatccttccacggcccctccccgcaccccccacccccgcccaccaagcaccggccccctttggctcttgggcagtacggacactggccccgtttgaagctctcgcgcagtgtatcgtcctaattaaatgctcagccgctcatcatgtcgcctccagacaatcgtttcttctatgtggcccagcacccttggctgaaggcaagccggttttgtggagatgtcgctacagccccttgtcttggacgcgcctcgacatggcctcttcagacgttctttcacaccaagtggtacttacgcctcctttctttgagtgcaagaccatcgagcgcgctcttgctcgagcattcggttttgggtttttgtctctcatcgaaaaacgtgttggatcaccgcgagctgttcggctcgcgaggacgggtgtaaagaagctgcggttgctcgcgcacacactgttcctctccgttgtccacgcatgcacccgcattaccaatgaacgccgcgagacactcgcaggcgaaaccccaacagcgttcatttgagcacactctccattgacatgaaaccctatccgtgacagacgaggagcgagatgcgcccgctctcccctcccgccgcggtctccaccactattgcacgtcaccgtgaagttcttgacagggtcatgctgactgggcaagccgcacccgcctctccacaaaatgtctatgccactagggacgtaagcggagagactgaagagtgcttgagcatcgagatttcagcttttctctctacttgtcgccgtaacgactactctctggatagtgcttcggtgcgccgtaaccaacaggaggcccgcgcctgccttgttgcagaggctcatcagcgcaagaaagccgttccctgccagatggcgtgccgatgtggtcaaacgccggtggcgtaccagatcattcagcgcctcccaggatagtggtcggacgggttttctctaccctcgtccctggtctttcccttctcggcagacggtgcggaagctcgtcgcctactgtctgccggaacacgcaactcctcctctcggctccgaccactcccggtgatgctaacgtggtataatgtcgctcatgacaaccaaccctgaacgttatttcgacaaaccatcttgtggcaatcccaaaggggttgttgtctctacttaccctccccgccgttgcctgaagaactgaactttttcatctcactgtttcgacgagtgtcatccgtgtgcggcacgcgcgccgatacggcgtcacaccgtgctgaagcttccactgcacggccactactcttctacagccaccccacccccgccgtacacacaccccaaaaaatgagtgacaccggctactttggcgcatcgcgtaccgctagcttaccttcgtgagggtatcaacgactgctacgtgacctccttctgcgtccgcgtcgtcctggtcggcagccctctcgcgcacatgaatccctacattttcgaagcgatgcgcatggtgggaccagatgctcgtccttttggccgcgacattggccctgcggtgaagatgtacaagatttgatagcgggacacccccagtgacgtcgcagcctactccgtaccatggctcactcgcgtaggggcagcgcagccgtggcgaacgccctaaccgtcccttcacaacgcgaagcgtgcgttcctcttgaatgtgcgcccttgtttcaggaagtgtggagaccggacctgacgccgttttttttgctggcttccacttaacagctcgcgctacatcattttcgagcatcttccgccgctgaatagactagatggaaagccgccatcgttcgtcttcctgccagccgtctatgagtgcaagttacccgcggaccacccgataacctacaaagctgttttccactctcctccctttcactgatgctctcatggacgagtacccgacgctctttgagtcacattatcgaccctcagaagaagtcgtatgacattgggaacttcgtcgctttcgctcactcaggcctgacgtcaagaaactccaacgatcgttctgccggccattcggcgtggtgtctctaacttccacccgcacccggaaccgcctggcaaccgtgcctgcgcgttccgcgtggacgagcagctttgagagatgaagcgcatcgtgacgaatgcaaaccgatatcccaagacaaacacgctgggtggtcgttggaacacaatgcgatgaacatgttcctaacataagtgcgccgcggctacaagtgtacgagcgcggagagccacctacctccgtgcaaaccagcttcgcgaccttgacagcctccccgcgttggagcaatacgtcgtgcacgggccgtacccacccgtggaagagtgcctgagacacttgaacgccacttgcgcgttgcacaagagggtttcccgccccttgacgtacccaagggcggctactcggcctagacgcgaaaaaaaaaaaccggggggggggtttggagcggctgcggggtgtctcatgcccgtctcaggtcggacagtctaccccaaataggcctctcaccagagaagcagcgacctggaccgccgtcgtgcgccgtacaagcggcgatggcgggaagcgcggacacctctggtcgatttgtgaagaacgatgtaaccatgatcaccagaatgacagaaattcaagaagctgtttgaaggctgactatgtagaagcgttcacacgtacatcgaggtggcattttccccgggtacccgcacaagcacgcccactaatggaaacctaacaacctgcgcaaggcctgtgtccgccgcgtcgaccccaccaggcctcaaccggaaaaaaagtggaagcgtcttaaggcaggcggtgccagctcggcgacgaaggaagccactttcattgcgcatctggcatctgccgaacatcgtttctgttcgactggaaatcgcaccctccagtaaagaccatgtgcgcgcgtcgcgaagaaaacgcgccgtgagggtgctcccggcgcgaacacggcctagccgcttggcggatttcatgagaatgtactttatcgaccacgccacatactaccatccaatccgaccgcaacacccaaccttttgttcctcgccaagtgtgacctgcacggaaagggcatccctcccttgcgaccgctgcagctcttgttgtcctgctccctgcaaaagctgaatgacccacccccatctccatccttcggcgcgctctcctcctggctatccagcgttccctgactttccactaactatcactttcttctggttggtagaaacgcattcctgcgtcttcaccgtgctttctttctgcacgcataggcccggaaggacgtcgcagactgactatgggggggcaactttgttaggaaagggtcgacggggcgtgtgaacctcagtcgcgctgtacgcctttaaaccagacgctgcaaaaggatccctgcgggagcgcacctactgggaggaaaacaaggcacccccccatccaccgctggccttaaccgcccttgaagtagcggaatcgagggctgtccatgttctaggaacaacgagcaaggtgccgggtggatcaaattcaaaatcaagaagctgcctcaccgtggccaacgtggtccgtcatcggtcatcgtccttggtggtgtacttccaacattttgctacttccggtatccctaccgctggtggggaatttacgccaattgatggcactagacgccacgcccgcagcatccaaagcaacctccacggccacccggggtaactagcctaccggaaaaactacacatctcaccgctcgccgcttgcgccacatgatgtccctggcgttccccgatgcaaacgaaaacgggtcacttcatcaacacaatcgctcactttcaagtgccacgtgagaggtcagccaatgagcagcgccctcaggttctcgcgcatctacgcacgccgcctgcgcgtttggtggcctactgccctcttactcgcagtatacgcacctgacggaaaagcggtcgctggtgagatcatttgccttttcctcggtcttcttatcccggcagaacaaccctcgctgcgctcctcttctttcgtcacttctcttcaatcccctcttctatcttctttttttttttcgatgggaggcgctctcaccagtgagtggcccgctcttcgctctctgcctttgggtgtggcgctgttctttgctgtccactacaccgattctttgctccatccaacagttctttttgcgtggtgaggcaggttgggcacgtcgcccggtatcaacccccgtcttatcccccttcccctcccgcccacttttttctcaatggcggcctccgattctcatgcgcccctcgtgtccgcggcactgccatgaactcctacgtccactcttcctcaagtgtaaacgcggcttttcccagcaagccatatctctagacgcgccctaccggcaccatccgcccgcgaaacatcgagttttttctcctcttccgctcccttctgaccttagcgtagaagggcggtcttcgttttttcggcatgtcaaccacaggcagcccatgggctgatcgagttcgagttgttcggacgacaaccgcccccgccgtctaacagcgagtagcttttcccggtgagctgtgcccggggaacgtagcagctgtccccagacgggcaagccgctcacctacaaggtctgcgtcttattcatcgaattaaaaatcgcatatttttatgattcaaggtggagacaatcacgagtgcaacggcaccggtggctgttccactacggatgttgcgcttcaaggacgtccctcgacggcaagggccggcaagcacaagggcctggtatgctctccatggacaacgccgggcgcaacaccccggcttcgcaatcccttcatcctgcaccatatcgtgccctgtttggacatgggaagcccggttgtgctttggtcatgtgcttccacgggtaacgagcagtgcaaactttggagctaacggtacaccgcacggtaagcccaccgtgacggctcattcatgactgtgggttgtgaaggagatggaaccctagcactactcttgtctcgatcgtttttttcgtcttgtgtgctggtcactgttgataaggtgttggccacgctacgcgaggcgtgcagctgcgggagctctcattaggatcacacagacgtaatgcaacgattatctgcatctcttgggtgtcgctctacgcgcggcgcacacagctcactatacggtgcacagccccctgcacgggggacgccccagcgatgccccccctcccctccctccccacctctttgccgttttctgcggtacatttgggaactggtcctctcaggcctcacttgcttggtaaactactttggtcaaactgcgctgctcgcctgcgtcacggtcaccccttcccgaactctttcgttcaccaccccaccgctgtgtttctcctttcccttccctcacaataacgggcactccttgcgcacgaatgaattcgtgccgttaccgctaccgtgtgcacgacaagcccttgcttacgaaggccccaccacagagtcagtcggcaaagcctccccaccgtaatgcgctccccccgtgcctcgtccacgttcctttctccctatagacgtcctatctttctagcctcacacgcgacacccctgcctgttcgagcatgttttccccgacagtcgccgaggggggcagcggttgagaaagttaccagcgaaaacgagtaagagagcccacggccacctcgagcgacaatggcgacgcagccccaaattcgtgggtgagcagctactggaagcatgatgacacgaagagatgtacatagccatgtcccgattttccttcatgtctcatcgtctcttgccctgctgacgagcacaattaactcaaaatgactatctgatgggctccgtttgccacgacgaacttactccctcgtggacgacggcggcagcagaaagcaattctactcctttgctaccaacatgctatagcctgggcccgctcatttgtcttatgtcgaacctaattcgcattgcgcgcgagcgcttttttttttgtacgccccggtcatccttatttcctgcgtcatcaacgctctattgtgtgctttgtgtgcttttcgaccaagaatatgcggagcgacttacagcactacattcctcgtttctggcctgatcatgcatgtgcaaccgatgttcctcttacatgcccatgaatgccgtagggtcaactacggaaaccaacccgcctggttgatcttcacacgaaattcggctcgcatcgaggactcatgtcacctgcgattggtggcgcacagcgggatctctggtgcagcactgtttttttttttgggtttttttttgttttgattcagttttgcttatgaaaaatgtggcgttaccccatgaagccaacttcaactaccgctggttgtctaattgctgttatcttcttgctgccttctacatgcctacaggttctcttctcacggaagaagcgctactactacacaaaaatactctactgacaacggattatcgccagtgtttctcatccacctgcccctcagaagcccgtttgtcttctaaccgcaactgtgcttgaacgtgggcagcccggccatatgtcccttcatgactaaaccttttgcgggcgattcatgttcacagtgtgcttcgcgttcaggtctattttcattgctgccctatttcgccttctcaacaccaaattctctccttcgaattaaccagtgtcaatcaccaaaggctttctcgctggggcctcagccaggccacttccattctctggatgccctcggcgccctgctcggttccctggcgtatgcggtgtgtatgttacttcggccgcatcgttcggagcctcgtcatgggggttatggagaggaaaaataaatacaaaatatccgcgcatttccacgccaaccctttcatccttctcttgccggctgcaagcgtttgggcttttcggcctgttatttttcacacttctggggcgtgatgggcagtagttgcccaaattcagctaccatgtgttcattccaccatcgattccctctttggtcaacgcgtgcctggcgtttttcttcaatccgcactttcgcgggcgctatgccaggcgcccacgcttcgacaaacggggcggctgttccagctcttcagcgtccaagtggtcctccgggccgtcgtgggagcagtggccgcacattccgtacctttatgtcaagcttgggtgttttcccgaggtgtatggctattggaaggactccccccttactttatgctgttccagtttgtgtcctcgatggtcatgtgcgcccaccctccccaattccgaggaggaccagctgccaggtggcagtagagagctagagccccgaacgagaacgtgcggcaggggtcgcccgcgcggaacgccttagcaccatgcccgccgatcgtttgtgtggcgtagagctccacgcacaaactcaagtcaaccaacaacctcgccgcgactgtgatggtcgcgatttttcatctacgcttctctaccctcagctgcgtaaacggctgtcagacggtttggctgtctccgcaggcaccacacagacgatttgcgtgactgctgactgcgttctgtctggtttcagctggaaacacccctttttttttttttttccgctattttttcctttttttgtttccccctccctccttgtggcgaagatttcgtttgtcttggacgtccccacagctcagcgggcaccctcggatcttggcttgtttgcttccctgtccccttcttcttcattccttccccctctctcgcaaaacagagtgactccctgttggaaggttggcaaaatgatgggatctgaagggtcacagggtggccgctaacggtgcgaggcaggtctgcgcagttccgggaagccttgacacagacacaatgctagtaggcgtggctctcaaggcgtggtgtcgcgggcgttctttggttcgcaggcgtgtgtgccgaactgaacgactccttttcttctctgcaaaagtcccacctttctttgcccaacgttcttttttcatttatctggctctggcaatccatgttttctgctcgcacgccagacccctgggggcggcggacatccccaccgcgcgggtatcttgcacgaatccaccgccccgtactgatgtaggactatgcagccccacctccccttctactctcttctgatgtgccacccctgtccgaccccctgacggccagggcgctgatagcgctgcatcacggcgacccgcggcgcacaccacagtcgctgacgtgggagggctcatccactctcctgcgccggagggaggcctcatcgtcattcaccgacatgaacccaatagcgctctggtgcgatctgtgaatgggcgaggggttgttgggtacagttcgggcccacaggcagctctctgatggcctgagttttcgcgcatactctgcccactcacgtctaccaccgcccccgcacccgccagagaggtgggcgctgtaaggagttcattcgtgtattgtcgcccgtaaatgcgtttgacaacaaatgtgttgacaacacagaatctttttcccgttatttcctctctccactttgttgattttcgggatgttcccgagtgtcccgcggaggcttgtacggtacctcgtctcacaccttctgtctaccggtctgccggtgggttgaaggattgagccctaagagcggttcttccggagacactgtattgctcagcctgtgaacaggagcctctctcgtatgtcttgttccttgaggagctgtctttccgctcccctccaaggcaaatcaggtaaatgggagggtttctgctgggttgagtatctcgattttttctatttgcgcgtctttgcgttggtagctgtcgagcactgttgttcaggaagatcgtcttgtacaatggaaggtcagtgcccccgctgcttctgctgacaaaggtctccttcccctttttgggcgcgccccacaaggtttgctccgccgccttttgtgttttatttgtttcgtgctcctcgttacgctcctccaagcccactcctccgactctcgagtgattattcactgtgcctcgcatccgttgtggacttttacgcctcgaaagagggaaatgaaattttatgatgcaagcggccttagttttcggcttgattgcagagtttactcaatggggcggtcacgtcgctcctctaaccccgtgtggtgcctgtttgtggcgcgctgtgcgccctcgcgacaatgtccgtaggatttcgtccccctggtttgtcacatagtcccctcgtgccttcaaagcgccacgcccctacttccttttcgcgacgtataaaacgttcttttccaaatttataccccctccccctctacacttcttgtacgttcccagccacgtgccgttgtatttttagccgacagagctagacgacacaacacacgcctacacccaggtaagatctgccgtcgcgtccgcaaacctgcttttgcagtccggtcatggacaggatcgtacactctgggtgccggcatatgcctcatacgaatgcaccatccattcgcccgtgtcggtgtgagggcaccatggtcgtatgccaccccataactgcctgcggtggatttgcgtcctcgtggggatctgtcccgtgaggtgtgtgatacagcctacgcactccaggtggctatagaggagttccaccctcactctcgagtggcttgcagttggccgcaaagctctgtgaacacgccgtttcttcgtctgttgccgctgctgtccacaccgcttcggcggttcgtgtccctgtcttgttgagtaccctcctgcacaatcgatgttggtacaactgtttgactcacgtggtgacttccaccgacaggtccccccccccacggagtttccgatatttgtcgactccttctctactgtttggggtgccttactcttcatagtgcggtgggcgtgcttggcttttgacagtttcgagtggtgggtgtttctggcagcgaggactctgttgtctgcctccctccataactccgtatcagccctcggtggccaccactcacgaccgactcagtcacatacttcttttaatgaggcattcacgggacgtgaagggtcgcagagtgctacacaggggggccgctaacccaaaccacgaccgagttcagattgagcacagagcgaaccctacaatcttctactacaggcaaggtgcgctccagccgaggtcctctcagcaggccaagctcgtggcgcttcgttcgccctgctcgctatgcgggttgaagtgatggtcgtgtcacatgatgggtgccattgccccttgtcctcggcatgcaccctgagccccctaattgcttgctgtcacgcgccgacatgctgtgtagccctgcttttcccccccgcttaccgctcgctgcacatccctcccatggcggcatccgtaactcccgctgtattccgccgtacggtctgggtgatcgccgcgtgtttgggctgatgcgtgggccgcctatcctgcgcgctgcggtgcgggccgaagaaatcgtcgctggacgctgtcccgctccctcttgtctggcagcgggtcgctcttcacccacagtatcgcctcgattcttgcgttttgttccgtctgtcgtgggcagtctccattcctgtcggtcgtgtacgcgtgtcggttacctttctatcggaggcggacgtcgccgtgctgatggagcgccatcatgcctggcagcttccttcgcaccaacgacacttgcttcacttccattgtgaggcgcggactgcccactccgtctgttaaacgtgcgtccgctcctgcaggcgatcaacgtgcacgagcactcttcactcttcactgcctccctgacgttttggggcggtgtcgcggcccaccgttggttcgatacggcagacatgtggtgcgcggtgtcctctcccatctgcaccatgcatcaactgtgcctttagctgagtttatgtggtacagcgcgggccgtgcttatacgactctcaacctgctccacgtggctgacactcattgtgtccctgcgacccacctctgctgtggcttctgacggggacctttgcactgctctttcgtcgtacacagtgttttgctcagaacctgggagaatgagttctctttgccttcttccgcctgcactgatgagtgtttttggcggacactgttttgaggtacctctgcttgtatgcgttgtaacgcggtacgttgggtttggctgcgtttgccactcttctccatcacctattgcctaggctttcccagtcgctgtacctacctgcgcccctctacttctccggagaagacttacatgcattccacttcctgtactgctggttgggcattgctgcagcgactgccacacgttctgtgcgggggtgttctttgagctgttctctaccccacgaaagctgctcccgatgcaccagcaggcggccaagtggtggagcgcgccgcttaccttgtctgtttgggtgcgcgacatagcgataggtttcgggatggagtggggctcgtggattatgtggtatcccttttttggtttcgccgtcagcatgatgcgtgttcttttaccatgttggaaactgaatgcgtgttttcctgagtgcgccacaacgtggagactggcagatgcagacggtaatgctgtgcttctacggatccgcagtggacttcaccagagtgatacttgcatgtgccgggcggccgtcgcgtcaaatcgagtcgttccctggtgctcgagctgcggcagaggtctagggagaggaacgatactctgctgctgctgctctgtcgactctcgccgacttccacagcgacagtgtcgtggtgttctcgcgtgacagcgctggtgcgcccctcacggctgaaacgcggcgtgcctcgcgacaccccccgctttgagcgttctcctactcgtggccgtggtctgcgcgttggtagcgctcccagtggcacctgaactacgtgtatcgtcttgcccaaagactacgtactctgccggttcgggttctgcgtgctgctgcgatggcaacgggcggctggccgtagcggggtgggttcttgctggaagcgtactactgcgcacccctctctttcatcgctgctcggtacgctccacagctgatgcaaggtctctgtccctggaagtggtccacgctgttttgctgccttctgtcattcaggggactcgtacgattcgccatgggggttttcacaggtctctccgatgggagtctgctccctacctcgggcagatgttcggtgctaggcgcgttactgcttctcgtcctctaacgcagcggctgacgaagctggcagacacgtcggcgcaggcgttcccgcgtacagatacatccggctttctccacccaggttctgcatggtcctgttgcccgtctgcgcctccagactacagacgaggcttcgcggccatcccttcgcaacgggaagggaccacggcgaggcctgccgtcgcaggggcccagatgcaacaataactacagccccctcacctccaccatgttgccaggcggcgaggccaccgctgactgcccgaactgcgcgccagctttgctcgcgggtggcatcgcagactgcaggtatgtcgtactcgtgcgtacccgcgctctccggcaccgcccaggcccacttaggcggatcgtgatggcaaatgcccatgccctcaggctagcgatggtgggtccaaaggaggcttcgctctacgcctctcgccgtcgcctagcgcttttgttggttttcgcttcccatgctgcgcacgtttttgcggggcgggccatccttcttcccctagggcgcacaactccagagtcgcgcgggcacacacgcagcaacctgtcgctgctcgtcagagacgatctcacctcctgtccgtcttgaaaccgtgcatgccctgcccccgcgcccccttgcgaacccactccgccatctttgttcaccagggccgccaagccaacggcacgccctccacaaagccccccccccccccccctcctcccccacgcctcaccagggccacagcggccctgccaccgtgcgagacgcgaacccgctaaactgccccggtcagggcgcccacactccccggcagccaccatctgcgcgaactgaagaacccagttcgaacccccatccagcgcgccaacggtcatggtagtttttccctattatccccgtcgcatggtgccccttctttcacccagcgtccatttttccctgcagtcgggggggactatgtcgtccgtgactctgcacactcctttccaacaccgtccttccttttttttttcctattacctccctgtctattctttttttcgcaggattccatcaagcgccactgcacctccccgactgtacatcccaccagagcccacgccagctctcctacatcacgatgccccgcataaatgtacggctccctcgcaaatacgatgtcgaggctcagtttctaatgaatcaaaaaagaggccccggacgaggttgccactggagttcacatgaatgaggaatatccgcagagaatggagcaatggaactggattcacagagcaatggcctctacgcgttcatggcagttacgcgagttacttcagcgatttctttggaacgttttttcctgttgccttcgcaccggcgtgtggcgacacttgttcaacgctggtgccacctggcgccggccagaaagtcgaacccgaagctcaacctgtcatcaacactttgtctggggtttggcggaccatcagccctttttctcctgaccagttgtgtgtccggtggtcacttgaacccgctgtgacctgtgcaaactgcgtgtttgccgggttcccttggaagaagctcccaggctattttcctcgctcagtttctgggagcttttgttggtgccgccatatacttcggtcttgtgtgtgttgttgtttgtgtgtgtgtgagagagagagagtgagcgacggagaagagatgtgcgcaagtcaaggcagcgtagcgcctcactgcacgtgcgtgacgcactccgccgagccggcctcatcgctgcgtggcgccacgtaagggcatgatagtgtgccctcttgagggcactgcgctccttcatgccggccttgcgcatcgacggcatcgcgctacggtgcgcaagagggaagggagggcgcagggggctttcggcgtggggccgccttgacgcatgagcgtgagtgcacaagcaagctaaatgcgcggcgagagaaggaggagctgcatgcccgtcccgtctcgcggcagacggaacggagccaccggtggccgagaagttggaaaaaggagggtgaggagggcggcacagccggccttgtctatcgcgaattgaagaacagagaagcagtgagagggagaccaaaacgacggtacctgctgcaccgccttgcgagcacaaccaagcgtcataaaccgagcgaccgattccgcgaacgctcacagctaggatcttaattcggcccctacaactagaaatatggatctctcgaggctgctattcctttgccctcgacgagtgctggggctgtcggtttccactatcggcgattacttctacacagccctcggtcagaccggccgcgcctttgtgcggcgatttgtgtacgcccacagtcccggcctcccgatcggcgattgcgtcgcaatcgacccctgcgcccacctgcctcatcgaattgccgcaacagctctgataaagttggtcaagaccaatgcggagcatataccacgcccgggatccgcggcgatccctcaagtccggaagcctccgcgcgaagtatcgcgtcgctggcccatacaagcaaccacggccccagaaaaaattggcgacctcgtattggaatcccccgaacatcgcctcgcataaaaagtccaatgacgcgctgttaggcggccattgccgtcatgagacatgttggagccgaaattcgcgtgtcacgaggtgccggacgtcgggcagtcctcggcctaagcatcagctcatcgtagagcctgcgcgtacggacgccggcggtgtcgtccatcacctttttgccagtgatacacatggggagccgcaatcccgcgcatataatcacgcatgtagtgtattgaccgtccttgcggtccgaatgggccgaacccgctcgtctggctaagatcgtccgcaagcgctcgcatcatcgccgtccgcgaccggctgcagaacagcggccgtttcgggtttcaggcaggtcttgcacgtgacaccctgtgcccggcgggagatgcaataggtcaggctctcgctgaattccccaatgtcaagcacttccggaatctggagcgcgggccgatgcaagtgccgataaacataacgatctttgtagaaacatcgcgcagctatttaccccgcaggacataccccgccctccctacatcgaagctgagcacgcgattcttcgccctccgagagctgcatcagcggatactctgtcgcactttcgatcagaaaacttctcgacagagtcgcgggtgatttcaggctttttcatcttctgcgggtgaaaaaaagagctgttgtgagaaagtatgtaaacagtgacacaaaattatattcgggaaacgactcgcagtggaaacatgacagatagggaggggcacaaagacgcaagaaagtgtgttacatcggcagcgtttgttgagggagttgctggtttaatcccaccgggagttgggtggccgggccggtgtcctccccacttcgaaacacacaatgttttgacgtgtgttcattagaggcgcgcacaaacgcttgcatgtgtcacggagccaacagcgcgacatggactcgagatgccgagggcgagggcgagcataataagatcgatcacagcctggctgctgtacacagacttcctgtgcagcgggttggccaaaagaagcctggcgccgcaaagccgccgtgcttctacatcgcggtgtgattccgagactggtcactgacctcactctccttgttgggaatatttttaagtgtcagttgtcttcttgtttgggggataattaaaaaatacactgaaaatgtgtttgttgccgtactccgtgtgatgcattggagctcagtactcctcatacggcagcgaggctacgagcgctaatcacatctcgaactgctgatggctccatgcgcccgccccccacgtgggatcgtacttagttccactcgaagtcggggcggatacacgcggcggccccggataaagcacgttccacaatgcccgccgaatactgccgtgcgcgcacgcccgaagcgaaatcgtccatcaggccgagcttcttgcgcgcgctggtagtttctcgcgttcgagtacatgaccggcaccgggtcggcgctcagaggtcgcttgcccgccaccacctcgctcgccgacatttccggcaggtttgacaccgtgctcacagcgcgtcgtcgtagtgctccgtcatgaggtacgtcaggttcacctcggtgactccacgtactccatgttgaagctggatgttgcgcagatggatgtcacaagaacatgcccttgccactccgaccttgccgaagctgtaacgtgcggctgatctccgggcgagatgcgaggcttgccgcgatattcaccggtgcgcaccagtcgtcgaagaagcgtgtgccacttcggcgccagcttggccacattttcgcgggagtccccaaccgtcccgtaaagaaggtcccgtgcgatggaggatgtttttccccccccccccccccggggcgcgactatcaattacctcgcatctggccgttggtcgttccacgccgagatgcacccgcaaacacaaaaaaggctcggaatccgtcacagcagcgggtacgtgccgagaaataactcgaagaagtccggcgaattttttccggtcatcctccacatgatcaccgcttcatggcccagctgtctcaaagactgtgttcagcgcgaacttagtgcgggcgatcttgtagtagcccctgaacttcaccttccacggcggggcatcaaacgatctcgctgagggtccggggcgcaccacgctgatcgtcggtcgctcgccgtgtagctccgtgatcacttcgtaggtggcgttgttgccacagtctttggctcacatgatcgggaacttctccttctgtagcggaacttgacgattttttccacatcgctggccggtcacccggtcacaaggtacgcgatgacgagaccggcaggatcggctgcgaaccagttgctgcatcacctccgcgtcctcaggctgtcctcttcgccacctcacgttctcgcccttcgctaatcttcttcaagctaccccctcttgaaaccttcgccagtatcgatttgctctggccatctggtctggcgtccactgcttttgcagcttaatgattttctttcttctcgatctccacggccgggtccttttcgggacccgcgccggcacccctcaatcacgctcgcgtacgagagcaggacccagaggaataccacgcaggccgactaagatgagcgccttctgtgacgtttgagccggcatggcgaacagatcctcttgcctctactttttgcgcgtaaatccttgccttgcacgcaccccacgtcaagatacgtacaacaacaaaagcgcggctcctactctggcaccgtctagtggcacacacacagtacggaagctgcttctgaacaaatgttgctcctgccacgcaggaggccggtgatgttcgtgagtggccacacgaagatcggatgtgaggccggaaaggtaaagataatggtttttttttttttttgtacaatacacacacacacaatggggggatgggcaaactcgtttgattagacggagaaactaacgagctggatattagccaaacaagtagtagaggttgggcagcttggcgaagcgcgttgaggtatgggtgccaccaatgctcaccacaaagagaagacggaggaagaacgagaaggtggtgaagatagacgcacgagtagtgtgccggcagcgtagccctcacacccacacacactcacacgtaccgcacgcacgcagccgccaggcgtcttctttgcagcactattcctgctccccgatgcgcgcgaagcccggaatgacgccaaaagccagcctttcgccataactacgggggagagaagtcagccacccgcgcctctggcaagtgttcgaagacaaagacggattcagcatccgtcatcctatgaatgaagcagctatgttttttagtctcccgacatttcatggctgcacatcaaaccaaactcaatcaagcgagtgtgaaacacaccatgccgataataatgcacaccattgtgcgtgttctaaaccgtagccacataacatggccgaagccatggcctagtgataaaggagaacgaacacacaaatcggaggtgtcgggcaatcgatgtagagaagcagaccaccgcagaggtcaatgtagagcgaggccaaggagagaagagaacttaatggttgtagtcctgcagcctacccccccacgcagcgcatcttacctcgcttgccttcaatagtgccccacgcacgcgcacaaacactactagcgcacacaagcgcaacaaaaccggtaacaaaaacactaacacccacacgctcacaatgctcacaccaaagggatgtcgacatgtcactctccaacgacgtctagcacgcaacgcggtcgaagggatgtcaccgtacggtttcactccacaccccctatacatatggctcccagaccgcgccacgcaaaagcgagggcaataaacgtgtggttaacgtggaaaaatcacgtaggcagaatcaccgccgccacaagccccaaagcggcgctggtgacaactgcaccgttagaactcaacaattgcatacaacgaaaactcaaagggaagtcgccttaacgaaactaaaagaggcgaataaactgaaaacatcacatccgccactttttctcgtaggaccaggagacgtccatacgtggtccagccctcggggtgggccagatagaatccgccggccccgggagatgaaggagacgaacgctcagatcgcctgcccgggggacgccttacttcaggtcgtccttacggcccagttccgggccggacttgcaggagccccggagaatactggacccggaagccgtagcccttcctggccgccgtgctgcactcctcacttgaccagggggcggaatagacttccttctcgaaggagacgtcatacttctactttccggaccaataggacggtcgtgcttggtgacggggacgactcggtgttcagcttgataaccgcagatactggtgaagaacgccccagggagacgccctttccggcgaaggtgatggtccgagaaatttcgggccggatgcagaccggttcttccgcttctcggggtgccgctccagtcgtcccataaggccttgggccacttggctccagctcggcccagacctccttcatcagcatccagcccagtccggggaagaagtcggtccgatcagcactcggcctttccggggtcgaccatccgtccggccgttttcgttccagtcggagaggcaaccacacgggtgggtcggaaccgcaggatgggatacagggccggaaaatactccgaagagtcggggcgacctccaggtcgtcctcgactgatacgacggtggaatagggcgaagacgttgaagacctggttcaggcccaccgatagtccgggcgattcttataatagcctggaaacttccggtggctgagccgcgggattcggccaggtcgggctgggatattttgtggtatctgggagccatagatccgatgacccgggcgtgtcggcgtggccgcatccctgggagactatgatgggataacagctcggcggagggccgataacggatcattccggtccagggaaccgcttgacgtgtgacccggtcgcaggcgatgcctcatgatgggatgatgactgggtgggagggggtgtcaggcccagctggtccctccatcatctgcttgttttcttctggtcggtcctcctgctccttcatgaccagcttgggtgggtgaccatctgttctgcatctttcttggtgaacggtctggtcgtcctcgacgaccttgtggacaggtggcctgcggtgagtctgccggggcttctgggctcgacgtctgtcttctcgtccttggtgtcctctactctcccgcgtctccagtccttccggctgctcccacaggctccggtggacgggatctgcttcagcagcttcttctattctgggtcgccagctcgactcgacctcctcggcccgccggatgccttcgccggccaggccgttggcgccgccgaccttggacttgcggcgccccacctcgcggcgccgggctcggcgccgccgccctccgcccgccggcgatggggtccggccccaggaacagcagcggcagggcgtttccaggcgacgcaaaccggaagcgccgcacaggatcagggaccctcttccgactcatttgtgacaggggaggagagatgaaaggggagacacagtgtagtttgttgatcaagggagagtggtatagactgaagagagaggcaaacttcgatgacggagagccgctatgtacaaggccgaggggcaatgaaggactgaacgcgcagcacaaggcatgacccgacgcagtcgagcgctggtcgcggggcgagaatagtggtgcgcagaagagaaagaacaaggatcgcgccacggatgtggcaaaggggaaagcaaacaagagaatgggccagagaaacgcgagctgtagaaaaggcaagcggttgtggtgagaaggatcatcgtgatgtcccggatttgtgtgcctcacgagagcataaagagctcaaacgagagaaggtgcgcgccactgaggtggcggagggcatgcgtctcggtcagcctagcgtatggagatacgaacgtgcgccacagtaacctgcgttggcacaacgccggtgcgcacttacgccacaagctgcacagcccaaaggggtcaccaagacacatacacgcacctcaattctcgagcaagggtccgacaaagctccatttggtgtcctaaatggcaccaaagcatcccctttccgggagggagtgcctcaaacgtcatgggcctgcttggcgactcgccaacttccacaccgcggcaacgtccaagtgcccactgcctgctttcggcaacgtccagtgcggcggcgaattggtgggtatgtcaggatttttcttttcttgcgggggatactagatgaacacaacctatacatgtccccagagcggctacatccagaatgccgcgagtgacaatccataatgacatacggggacaaaacgattggagacacagaggtagggccgtagaagagggtgcccacgggtgcgtacctctgtgccgagttccattcccctgcatgctactccattatttttttcatccatggtccgaagtgcgtgtccttacatcccatgttgaatgcatttactcccttggtgtctgagagcgatatttcaatctgtctcacattatctgcactccctcttccccctgcccccctctctccacacacccatcggtgatggggtcggccaggggggggggggggaagggggagggagagaagcccacgcacacgcaagaacgcaaaaaattatgggttggcgtgaagggagcgtctcgtgatacagagagcttattcgtcacaagggggaggctgcaacgaaagacgggggcagactgaaatcgcagcatccacagggacgagataagaacaggcgacaggagagcgccgccgagagccaacaggcacgtgagaagcaggtgatggctgagcatgggattcctaggaaggcacagcattttaaaaggtgccgaacacgaataaccatggtgtagggcgtgatgcacggagcaaaggtgtagaagagactccgaggccagagcgcagatgctacgactatttgccattgttccaaatgcgcatgcctcgcacagcacccggctgtggcaaaaaaaaaaaaagggggcgagcaaggtagcacatcctcaatgagcgaggcaagaaaaggagacacatagtggcctcaacgtgacggcaatcgagacagtaaacactacccacgtacaaaaggcgcaaacgtcactcaaggccgaaaaaggagaagacaggggagacaacaacgacaggcatggacaagaagcaccgtgccagagtcctctttctcactcacttttgccgttaactgctctttcctcgcagctcgacggccgttgctctcgtcacggcacggcgtacagcgcgcctgcctccccgccttcgaagagaaatgtagcgctagcacacaactacgcagcgtacaaccactaacaacgaaagcgaagatagcaccgtggcattagaacagtcgagaggcacggcactcagggagcgccaaagagagtccccgcacctgaaggaacctcacaggtgacagcaccggccagcagcagtccccgccattaatttacggagagtagacttgtcacttgttaaaaatatgtcaacgtatgccatgcggtttccgcatcgctaaagctcttcctcccctcaacactccaactgcgctgcgccccgcgtggtcggcgttcatgtagccgttggtgacttcgctgcggcagcctcgccaccgcgggcgcagcaggcgtgcaccgcttgacctcctcgcttccgcagcgattcctcacatcctcctgcttcgtcctgtgcgcttgtacgccaaccatcttgctgcgccgcgtcagcacttcccgttgtgtctcgtccacatggtgtttgggggtgggctgaactcgatgcccgcggcgtcccgcgcctccctccgattccgttggaaagtcgtccagcgcggcagccctgcttctccttcagctcgaaagctcctcctccacgcctgccgcagcttgtaccgctctttcttcttcatgtccgagtgcttcttcgcgttcggggtcgaatgtctccacgcagaacccagctggatgtgccaaggctatgttccgtcgacttcctcccgcgcttctctttcttatagatcagcgaccccagcgggcagttacagcatgcggaagtactccatggtgctccttgtggcacctcacgccgcagcgccacaaggtctgttcgtcttgtcgtaccggccttcaccccgcgcacccctccgacaccatctcctccacacgcccatgcaccgcatcgcgaggtcgcagttgacaccgtgtcagcccagagcttcttgtgcggcgcgggacctccatgaactgcgcattctccacgcgccgttctcctcgcggtccactctcctcgatccgccgcttcacctcgtcgaagcggccgtccccgagtctcttcaactgccgctccaggtcctggatcttgtccacgctcctccctgctctcttctttctccttgtagcgctcgtcgctgcgctccttgttcgcagcggtaccgcttcgccgcctccgcgtcctcgcggtactcattctggatcgcgtctggatgtgcttcacaaaggtccgtctcacaccgctgccgcagccgccctttcgcgtcccttcatctggtgtctcttgttcgcctttttctgcacctcgtgagctccttgaactgtgcttctcgctcctcgcactgcttcccgatcagcccaactgtccttcaccgctcgatcagccgctcctgcagctgcccttcgtccacatctgcttcctctgcaacctgcactcgccgtcgtgcctcgaacgttcttggatcttcgttcggtcttctccagctgcgcatctgcgtctgcatctgttcgtccgtctacggcaagcgcgttctggatctgcgtcgcgttcaattgatgtcctccatcatcttcaccgtccgagacggcccctgcgcgagcctgcgtcgcgtccagctgcgccgccgcagctcctcctccaccttctacacatccttcgtgcatgctgttgtcgatcagcttgcgtgaagctcacaagtaacgcgcgtcttgttcggttctgtcgaaggtcctttagcaccttcttcacgccaatgatgtccatgaactgcggcttgttccccgggcgtacagctcgcgctgatcatctccagcccagcacacgcgcaatcagcttcgccagttcgacgcctccatcagttccacttcgtccccacctccacggacgaagcatcccccccctcctcgcccttctcatgggcgccgcgcagcttctgtcgctgcgtcttgaccatcagagggatgtgcagctcctgcacaagctcctcattctcaggcacgccgtcttcagcttcggttatggatcttctgcttgcgtgcagcctccgcccggtcgccatcttcaggggacatcattgtgacaattgtaggagaaggaaaggggagacacagtgagtgtgttgacaaggagggagtgtctagctgaagaggagaaacggcatgacggagagcccctatgccaaaggcgcaaaagggttacattggtacgaagtgagaggaagatgagaaccgcgaaggttgcgcgggaaactttgtggggagggtctcggtgtcggctggtgggtggtgtggtagtcgtttggaagatgacgttggaggcaactgggaatgaaggggtatgttagtgacgcagacggaggatgttgtggagtggggtcgtgcagcgggtgacggtggcaatgagcgtggtctaggaggggggaggaaaggagatgcagtgtgtgcactggggagggcagtgctaaaggtgactgtaatcagtacgtcgttgtcctgaggatctttactgtttgttgcgagtgcaaagatgagtctcgaaggggaaacgcataatcgccactagtaattattgaacaagaccgggcgacgtgaacacacaagaatcggatgcgcacgcgaagcggggggtacccacgtcgactgtccttcaaccacccgtttgtccgccagaggccacgccacaacccgttcccacacaagagacggcgctggaacacatgtgactttatgcatttgctcacacacggacacttgcgcggcggcatgggcgcgggctcgaatgctgctgaagatgctggtcatctcgcctcggccttgggaggcttactgccgctttcatgtttgccctgatgcatttacaccgtcattatcttttttcttcctcgccctttttccggatttgtttgcgcctttcctcccccacgacacccactcccacgcgtgcaaaggaaagagacactgtccctcaccgcagggtggccttcaaaggcacgggctcaatgccgcagcggcacctcgctgtggattcccccaatcgaaatggcttgtcactgttccgaatgcactgctatggtgggatgactgctgtgggttcgttgcttcactttcacggggaccgcttgaccacgtcaatgggtcttcatatgctgcactatcgtgccttttgaagcacgtcaccgtgtgctagtggaggagggcgtagcagggaaaatcggatgctatgcggagtggggttgtggtggggggagggtcggctgctggggggggggtggtgacgtgtatcacagtttttgttctttcctccgtccctacagaaccttggtcgtgtagacaggcccaccacccctctcctctggattaagtgtccatcgatactcctccccccattttggggggctgtgtgcccatgcacctcgcctcttacttataccacactggctgggggtcgaagtgtcgtatcgcccagtcgctggtaggaatctggcggagagcccgcaacctgaatgtacagtcgacattcctcagcattggccatcttgggcggaaagatctctgactgacacatcggtgaacgctttccttgacgcgtctatgcgtgctgtagtgcaagagagagcggcaaccacggcaggtgtcccctcgggcgctagcggggtccccagtacagatcgcacctggcggtgcggccgttgttccgttctcaatgccgccatcacggcgaagtgggccatcctcgctgcgtagggtgggatcgctctcgacagcgtcctgtgtgtagattcatactggatcgctttaccgggtgcgcgatagaaaggagtttccacggaaccgcccgtcaccgccgtagagcaccgagccacctcatccggtcacctttggcctgcagcggacacctcaccgaggacagtggggggggggcgggttttgcggattaacgacggtgtgaataaaatgctccgcttgcagcactcggcccgctcgcatggcaatcactggaacgtgccgatgcgacgccaccccgcatcgttgtcacaagagccgtgacggtgtcatgaagtgctgcacatcgaggtcgatctcaacaaagacggaacatcatgttccgccacaagacaatctttgatggaatgaggcagctgcctagtggatgaaagtcacacccgagggctgctgccggaatcacgacacagccgccccatacgtgcacatcgcctatgattaccatttcgaccccggagcctcctccataaatgtcagcgatgggatgcaaacagagaaagcctcagaaacttcaagcaacgcggtgcgcatctttttccttgatgcgcttgatgcacgtatcgatctcaaagcgttattcgtgggaggtcctagcgtacgctgatccctcccgctgcttcctctcgtcagccggcacgtcgtctagtgcctgcataaatttccgctgctgttgctttttagcacgtgcaacgtcataaaccccttctcgtctttgcgacactgccgccgttcgggaagtcttcgcttgtcatcctgtagtgttagcaccgggtgtactccctcccactgtacggcgtgtatctgttgatgctagccctcgtgttcttgctactgttgccgatcgcgtgcgtactcctcaaaagagagtggccccacacagaaaacggtgatgataaaagaagcgcagaaccgctttgaagaggggagaaaatagaaacaaagggtggacggtggagaagggaggatggtgaaggagcccgttgtccattgcagacagggtgagggacagtgtcgtgaagtcgcgctgcagtgtagcctcgatagagctagctccagaatacggtgcagccgttcccaccaacactatcccgccatttcgtacaaaaggacagaaggagcggaaaacgggtcacgcatgtacccctcgcagtcgggtggatgacgactatacatcatggcttacagattgtgaacttgtacactcgagatatgtaccatagcggaaagcgcgcctcaccctttttacgtgatcgaaacgatccaagcagcgaagagagaggcggcccaaatcaatagtaaacacggcatgacacagcccaccacgcaatgcagtcgcattgtgcgggagaagacataggcatgtaagacgcagcacgggaacgccaccaacaaaaaaaagagcgacaaggtacaacgatagtccgctgcgtcgatgtccctcgtttcctccttcgtcatttctactcgttccttgaggtacacctacttttcccgccggcctcccgtccgacgtcgctttccgtggaccgggggggggggggggtccacttcagcaagctcatctcagacaggcggcggtcggaacgagcacagaactgaaccaagtactctcaagacgcatttaggctgtgtcatataagtggcacgcgagggatttcttctaactccactctcgctgacgactgttatcatccgtcgagcacgaagctcgtttggcgacagtggagcattgccccgctcattcggacgccgctagcacctccgcccagtgcgccgtcatagatgtacacccgccgcctacgaagcctcgcaggaaactcgtggtgcgggcctagctcggcgcacaccaccactaccctccacgatgcaacgcagctgagcgcttgcgctgcagtcacagcacggcaatcgatgcgacaggagacgtaacccatcgacgtggctacctcggcgctccaactcacgtctcttcgctgacgaagataaccgcttgcgcgcaagccgtgacatacgcaggcgtcagtagccatcgtcccgcagcgaggccgcaaggaactgctcctcttgacgctttgcagttatagtgctgcattcctccggcttgctcgtgcgtcgaactgcggacatggctcgcaaggtgttaaagtcgctcctccctcgacgcgtcctttgtaatcaaaaacccttcatctgtggagtcagatctagggtagacattggtgaattgctccagcgacgcagctggtaggtgacatggcagccttgactgtcctcttctccttacagctttcggtgatcgtacatggttgacgtttcagggtctccgcaagactgcgggtaccatcatcctcttcgagtcccattctgataaagagacctgtgattcgatctgacatagtgcggctgagcagttgcctgctgctgcagcgcgcgtgccggaggtgcgacgtggagtacgcgggcgtttgctcacgcacagatcggcaccggcggccatggggttcctagtcactccacctccttgtaatttggccttgccctatcgctgcccatacggaacgtaacacaggatactctcttggtacactccctgagtaaggatggagctggcatgctcgagtagagccccgaccggcgttgctggtggcccactctagctcccctagaatatcaaagccgctggtgtgcactgggtggttgagataggctaagacagtggtgagtcggtctatgtggtgcagcggcacggcaagatccgcccttgtggaggcgcgttgcttctcttgcttgccgttcgccgacggcgaacgcgcagcggagcggggagaggagcctgaggggaggtggactgaatttcctgcggtgcagatgttaccaccgctgctttcaacgggaactcgcgccaccatctcccctcgtcgtcatcgtcccttgcgcgagtgtgtgatgttgggaacgccgtgtcccttggagggcccaacatctgtgttgtgatgctgggatgatgccggccactcctcctcctgcaccacttccactgtttcccccccccccgccgcaggtttctctaggcccctctcggagccgcattcaatcgcgccggctggcagggcaacgaaaaggagtcgataatggatggtgcaatcggaggtctgcatagggaaatttgtgccgtcgtgacaacgacggcggtttagaaatgcgcacgcactggaggccctcctgggacgttggctgctgtttggacccgctttgccgcctgtccgcacggactttctcgcgagtgcaaacgcatcaggaattgaatcgccgcgtggaggtctgaatcccaccattgcaccccttgaatcatcgatagaccagtcccacctcgacgagcggcaacatcaatgacgagtcaagggagccgatgtgcggttgtggccgaagatactgatagtgacgctgggcaagcaccgcaaccttttgggagaaagacttgtctcgaggtacaacaagatgtttgtgcgcacgggaggtacaggtgggctcatcggattttgtggagggcctggaagcgtttgccataccctcatcactgctgccaccaagcacgaggctttcctggaccttccctggcagcccagattgctgcatgcgctgaaagtagcgcatgccgatctgtccgccgcaggccttgaatgtcacccacaggacagaagacacacgacgcggaagccgaggcatgagatcggcgctgctccagcccgacactgcgtcacacccaacttcccatacacaacttgcgcccaggaccggataaaggattcctctctctgtcaccataagaggactgtgttgtgaacggagtagctgaggaagcagtgatcccaatgccactcagtaaggtcgtgctgcgcgggttttgaaccgatggcaaggtctgcatgtatgctacacgtcgatgaatcatcggtccgtagactccgagaccggcctgatggagaagcgcaggctgctgttgctgcagtgggtacgacctgtgacgacgacagagacggtttgaacggcgcttgtaaattcggtcgcaccccttccacatccctctgtactcgaggccctctcacgctggtgtgatactgcaggtacaattaatctgcagctggatctgatagtcgaagtggcagaccgcactggctgtgctgatggtcgcagtggcccgcagacgacacccttttatcattcgaacgactaaggagagggcggggggggggtgtgttgggcagtcagcggagcgccagtgagctacaatccgtcttgcgcttcgttcgcatgcaacatcttggtagcgttgccatactattctgctacccggctggacgcccagagtcaacgactcaatcgtgcgcactcgcactggcgccgagtcctctggcgtcagatggtgacggtaaatggattcggtggctagttgcaagacgaactctcgacggcaatgatcgggatgccaaggggtgctttcgcgcgaactcgaactttctcgtttggatcgttggggggcgacgtgatgacaatgtcaagctatctcgctgccgatgcaaccaacacccccaatgccgcttttcgcatagagctgtagttgcagcgcccgcggcaccctgccgtcacacgtcctcgttcaggtgggtcacgacttgtattacacccacctctttccccgtccaatccgttcccgatttcgtaacggtacttggattcctcgcgcagtcaccctctgtcacccattcaatggata

SEQ ID NO: 241 - DNA, 4005 bp, Artificial Sequence
  pLMTB6681
tcgcgcgtttcggtgatgacggtgaaaacctctgacacatgcagctcccggagacggtcacagcttgtctgtaagcggatgccgggagcagacaagcccgtcagggcgcgtcagcgggtgttggcgggtgtcggggctggcttaactatgcggcatcagagcagattgtactgagagtgcaccatatgcggtgtgaaataccgcacagatgcgtaaggagaaaataccgcatcaggcgccattcgccattcaggctgcgcaactgttgggaagggcgatcggtgcgggcctcttcgctattacgccagctggcgaaagggggatgtgctgcaaggcgattaagttgggtaacgccagggttttcccagtcacgacgttgtaaaacgacggccagtgaattgacgcgtattgggatatttaaatggtaccggccgagccgcatacgtctctcgcacggtctcgtttatttgatcatgtagttgagtattaaattgggaagacaaaaacataatagcacgaagagtcgggcacgaaaagcccgatctctctctctctctctcgtgcgcgcaggggcgtgtgggtgcacgacgacgaggacggaggggggaagggaggcataaacggatcgatcccccatcgcacatgcgggtacgagcattatctgctgtgtctggtcctttatcatatcgctacccgcccgccccccgcccccctcccccccccccccccgcggctcctgtcactgtcgttcctgcgactccccacacacccgcgcaacgctcatgtcacgaagagaaaagtagaaggcgtggcgatgcgttgcgcggccccctgtccgctggcatgcagacgtcgagccgtggaacggatggtagcgagagacaacgcggcgatgcaggaaaggagatttactgcaggacgtctacacacgcgcgcacaccactgcgaatggcaccgtgctgaggaaaattgggggggagggcgcacgggggcggggcaggaaacggttggatcagcagcactctcaacttgtgtccgtattgcgaaggagggagaggagcctgcccgtattatgggcgctgaaacgtcggaaccacctatgaatcccacttctgcgtcgcggaggcgtactgcttccgaccacctccgcagctcacgcgcgtcgagctccctccctttccccttctttccgttgtgtgtgtgtgtgtgtgtgtgtcttgtcacgatgcatggccatctctcctccaaccctccacgccttcctctcccccgcccatcaaacgcgctacggccacaaccatttcttcaagtatcacatccaccaccactcttacccacctaccctcttcgactctgacacagccactgacgccctctccgcctctctcgctcgctgcacattgactctccacagccccccctccctcgcacagccagccccacccacccacccacccacccaccgctctacacacctccacagcagccatgaagatttcggtgatccctgagcaggtggcggaaacattggatgctgagaaccatttcattgttcgtgaagtgttcgatgtgcacctatccgaccaaggctttgaactatctaccagaagtgtgagcccctaccggaaggattacatctcggatgatgactctgatgaagactctgcttgctatggcgcattcatcgaccaagagcttgtcgggaagattgaactcaactcaacatggaacgatctagcctctatcgaacacattgttgtgtcgcacacgcaccgaggcaggtaccatttaaatatcccaatggcgcgccgagcttggctcgagcatggtcatagctgtttcctgtgtgaaattgttatccgctcacaattccacacaacatacgagccggaagcataaagtgtaaagcctggggtgcctaatgagtgagctaactcacattaattgcgttgcgctcactgcccgctttccagtcgggaaacctgtcgtgccagctgcattaatgaatcggccaacgcgcggggagaggcggtttgcgtattgggcgctcttccgcttcctcgctcactgactcgctgcgctcggtcgttcggctgcggcgagcggtatcagctcactcaaaggcggtaatacggttatccacagaatcaggggataacgcaggaaagaacatgtgagcaaaaggccagcaaaaggccaggaaccgtaaaaaggccgcgttgctggcgtttttccataggctccgcccccctgacgagcatcacaaaaatcgacgctcaagtcagaggtggcgaaacccgacaggactataaagataccaggcgtttccccctggaagctccctcgtgcgctctcctgttccgaccctgccgcttaccggatacctgtccgcctttctcccttcgggaagcgtggcgctttctcatagctcacgctgtaggtatctcagttcggtgtaggtcgttcgctccaagctgggctgtgtgcacgaaccccccgttcagcccgaccgctgcgccttatccggtaactatcgtcttgagtccaacccggtaagacacgacttatcgccactggcagcagccactggtaacaggattagcagagcgaggtatgtaggcggtgctacagagttcttgaagtggtggcctaactacggctacactagaagaacagtatttggtatctgcgctctgctgaagccagttaccttcggaaaaagagttggtagctcttgatccggcaaacaaaccaccgctggtagcggtggtttttttgtttgcaagcagcagattacgcgcagaaaaaaaggatctcaagaagatcctttgatcttttctacggggtctgacgctcagtggaacgaaaactcacgttaagggattttggtcatgagattatcaaaaaggatcttcacctagatccttttaaattaaaaatgaagttttaaatcaatctaaagtatatatgagtaaacttggtctgacagttagaaaaactcatcgagcatcaaatgaaactgcaatttattcatatcaggattatcaataccatatttttgaaaaagccgtttctgtaatgaaggagaaaactcaccgaggcagttccataggatggcaagatcctggtatcggtctgcgattccgactcgtccaacatcaatacaacctattaatttcccctcgtcaaaaataaggttatcaagtgagaaatcaccatgagtgacgactgaatccggtgagaatggcaaaagtttatgcatttctttccagacttgttcaacaggccagccattacgctcgtcatcaaaatcactcgcatcaaccaaaccgttattcattcgtgattgcgcctgagcgagacgaaatacgcgatcgctgttaaaaggacaattacaaacaggaatcgaatgcaaccggcgcaggaacactgccagcgcatcaacaatattttcacctgaatcaggatattcttctaatacctggaatgctgttttcccagggatcgcagtggtgagtaaccatgcatcatcaggagtacggataaaatgcttgatggtcggaagaggcataaattccgtcagccagtttagtctgaccatctcatctgtaacatcattggcaacgctacctttgccatgtttcagaaacaactctggcgcatcgggcttcccatacaatcgatagattgtcgcacctgattgcccgacattatcgcgagcccatttatacccatataaatcagcatccatgttggaatttaatcgcggcctagagcaagacgtttcccgttgaatatggctcatactcttcctttttcaatattattgaagcatttatcagggttattgtctcatgagcggatacatatttgaatgtatttagaaaaataaacaaataggggttccgcgcacatttccccgaaaagtgccacctgacgtctaagaaaccattattatcatgacattaacctataaaaataggcgtatcacgaggccctttcgtc

SEQ ID NO: 242 - DNA, 4796 bp, Artificial Sequence
  pLMTB6683
tcgcgcgtttcggtgatgacggtgaaaacctctgacacatgcagctcccggagacggtcacagcttgtctgtaagcggatgccgggagcagacaagcccgtcagggcgcgtcagcgggtgttggcgggtgtcggggctggcttaactatgcggcatcagagcagattgtactgagagtgcaccatatgcggtgtgaaataccgcacagatgcgtaaggagaaaataccgcatcaggcgccattcgccattcaggctgcgcaactgttgggaagggcgatcggtgcgggcctcttcgctattacgccagctggcgaaagggggatgtgctgcaaggcgattaagttgggtaacgccagggttttcccagtcacgacgttgtaaaacgacggccagtgaattgacgcgtattgggatatttaaatggtaccccgaccaaggctttgaactatctaccagaagtgtgagcccctaccggaaggattacatctcggatgatgactctgatgaagactctgcttgctatggcgcattcatcgaccaagagcttgtcgggaagattgaactcaactcaacatggaacgatctagcctctatcgaacacattgttgtgtcgcacacgcaccgaggcaaaggagtcgcgcacagtctcatcgaatttgcgaaaaagtgggcactaagcagacagctccttggcatacgattagagacacaaacgaacaatgtacctgcctgcaatttgtacgcaaaatgtggctttactctcggcggcattgacctgttcacgtataaaactagacctcaagtctcgaacgaaacagcgatgtactggtactggttctcgggagcacaggatgacgcctaactagcctcggagatccactagttctagttctaggggccgaattcagatcctcgtgtgagcgttcgcggaatcggtcgctcgtgtttatgcccgtcttggtgttgtgctcgcaaggcggtgcagcaggataccgtcgccctcctctctccttgcttctctgttcttcaattcgcgatctcacagaggccggctgtgcacgcccttcctcaccctccttttcccacctctcggccaccggtcggctccgttccgtctgccgtcgagaagggacgggcatgtgcagctcctccctttctctcgcgcgcgcatcttctcttgcttgtggcactcacgctcatgcgtcaaggcggccccacgccgagcccctgcgctcccttccctcttgcgcatccgtagcgcggatgccgtcgatgcgcaaggccggcatgaaggagcgcgtgccctcaagagggcacactatcatgccctacgtgggccacgcagcgatgaggccggcttcggcggagatgcgtcacgcacgtgccagatgatgcgctacgccttccttgacttgcgcccccctctcttcctccgtctctcactctctctctctcacacacacacacacacacacacacacacaaagctccggttcgtccggccgtaacgccttttcaactcacggcctctaggaatgaaggagggtagttcgggggagaacgtactggggcgtcagaggtgaaattcttagaccgcaccaagacgaactacagcgaaggcattcttcaaggataccttcctcaatcaagaaccaaagtgtggagatcgaagatgattagagaccattgtagtccacactgcaaacgatgacacccatgaattggggatcttatgggccggccagcggcagggtttaccctgtgtcagcaccgcgcccgcttttaccaacttacgtatcttttctatttggcctttaccggctacccacgggaatatcctcagcacgttttctgttttttcacgcgaaagctttgaggttacagtctcaggggggagtacgttcgcaagagtgaaacttaaagaaattgacggaatggcaccacaagacgtggagcgtgcggtttaatttgactcaacacggggaactttaccagatccggacaggatgaggattgacagattgagtgttctttctcgattccctgaatggtggtgcatggccgcttttggtcggtggagtgatttgtttggttgattccgtcaacggacgagatccaagctgcccagtagaattcagaattgcccatagaatagcaaactcatcggcgggttttacccaacggtgggctgcattcggtcgaattcttctctgcgggattcctttgtaattgcacaaggtgaaattttgggcaacagcaggtctgtgatgctcctcaatgttctgggcgacacgcgcactacaatgtcagtgagaacaagaaaaacgacttttgtcgaacctacttgatcaaaagagtggggaaaccccggaatcacatagacccacttgggaccgaggattgcaattattggtcgcgcaacgaggaatgtctcgtaggcgcagctcatcaaactgtgccgattacgtccctgccatttgtacacaccgcccgtcgttgtttccgatgatggtgcaatacaggtgatcggacaggcggtgttttatccgcccgaaagttcaccgatatttggtaccatttaaatatcccaatggcgcgccgagcttggctcgagcatggtcatagctgtttcctgtgtgaaattgttatccgctcacaattccacacaacatacgagccggaagcataaagtgtaaagcctggggtgcctaatgagtgagctaactcacattaattgcgttgcgctcactgcccgctttccagtcgggaaacctgtcgtgccagctgcattaatgaatcggccaacgcgcggggagaggcggtttgcgtattgggcgctcttccgcttcctcgctcactgactcgctgcgctcggtcgttcggctgcggcgagcggtatcagctcactcaaaggcggtaatacggttatccacagaatcaggggataacgcaggaaagaacatgtgagcaaaaggccagcaaaaggccaggaaccgtaaaaaggccgcgttgctggcgtttttccataggctccgcccccctgacgagcatcacaaaaatcgacgctcaagtcagaggtggcgaaacccgacaggactataaagataccaggcgtttccccctggaagctccctcgtgcgctctcctgttccgaccctgccgcttaccggatacctgtccgcctttctcccttcgggaagcgtggcgctttctcatagctcacgctgtaggtatctcagttcggtgtaggtcgttcgctccaagctgggctgtgtgcacgaaccccccgttcagcccgaccgctgcgccttatccggtaactatcgtcttgagtccaacccggtaagacacgacttatcgccactggcagcagccactggtaacaggattagcagagcgaggtatgtaggcggtgctacagagttcttgaagtggtggcctaactacggctacactagaagaacagtatttggtatctgcgctctgctgaagccagttaccttcggaaaaagagttggtagctcttgatccggcaaacaaaccaccgctggtagcggtggtttttttgtttgcaagcagcagattacgcgcagaaaaaaaggatctcaagaagatcctttgatcttttctacggggtctgacgctcagtggaacgaaaactcacgttaagggattttggtcatgagattatcaaaaaggatcttcacctagatccttttaaattaaaaatgaagttttaaatcaatctaaagtatatatgagtaaacttggtctgacagttagaaaaactcatcgagcatcaaatgaaactgcaatttattcatatcaggattatcaataccatatttttgaaaaagccgtttctgtaatgaaggagaaaactcaccgaggcagttccataggatggcaagatcctggtatcggtctgcgattccgactcgtccaacatcaatacaacctattaatttcccctcgtcaaaaataaggttatcaagtgagaaatcaccatgagtgacgactgaatccggtgagaatggcaaaagtttatgcatttctttccagacttgttcaacaggccagccattacgctcgtcatcaaaatcactcgcatcaaccaaaccgttattcattcgtgattgcgcctgagcgagacgaaatacgcgatcgctgttaaaaggacaattacaaacaggaatcgaatgcaaccggcgcaggaacactgccagcgcatcaacaatattttcacctgaatcaggatattcttctaatacctggaatgctgttttcccagggatcgcagtggtgagtaaccatgcatcatcaggagtacggataaaatgcttgatggtcggaagaggcataaattccgtcagccagtttagtctgaccatctcatctgtaacatcattggcaacgctacctttgccatgtttcagaaacaactctggcgcatcgggcttcccatacaatcgatagattgtcgcacctgattgcccgacattatcgcgagcccatttatacccatataaatcagcatccatgttggaatttaatcgcggcctagagcaagacgtttcccgttgaatatggctcatactcttcctttttcaatattattgaagcatttatcagggttattgtctcatgagcggatacatatttgaatgtatttagaaaaataaacaaataggggttccgcgcacatttccccgaaaagtgccacctgacgtctaagaaaccattattatcatgacattaacctataaaaataggcgtatcacgaggccctttcgtc

SEQ ID NO: 243 - DNA, 4834 bp, Artificial Sequence
  pLMTB6737
tcgcgcgtttcggtgatgacggtgaaaacctctgacacatgcagctcccggagacggtcacagcttgtctgtaagcggatgccgggagcagacaagcccgtcagggcgcgtcagcgggtgttggcgggtgtcggggctggcttaactatgcggcatcagagcagattgtactgagagtgcaccatatgcggtgtgaaataccgcacagatgcgtaaggagaaaataccgcatcaggcgccattcgccattcaggctgcgcaactgttgggaagggcgatcggtgcgggcctcttcgctattacgccagctggcgaaagggggatgtgctgcaaggcgattaagttgggtaacgccagggttttcccagtcacgacgttgtaaaacgacggccagtgaattgacgcgtattgggatatttaaatggtaccaaattggataacttggcgaaacgccaagctaatacatgaaccaaccgggtgttctccacttcagacggtgggcgaccatcgtcgtgagacgcccagcgaatgaatgacagtaaaaccaatgccttcactggcagtaacacccagcagtgttgactcaattcattccgtgcgaaagccggcttgttccggcgtcttttgacgaacaactgccctatcagcttgtgatggccgtgtagtggactgccatggcgttgacgggagcgggggattagggttcgattccggagagggagcctgagaaatagctaccacttctacggagggcagcaggcgcgcaaattgcccaatgtcaaaacaaaacgatgaggcagcgaaaagaaatagagttgtcagtccatttggattgtcatttcaatgggggatatttaaacccatccaatatcgagtaacaattggaggacaagtctggtgccagcacccgcggtaattccagctccaaaagcgtatattaatgctgttgctgttaaagggttcgtagttgaactgtgggctgtgcaggtttgtccctggtcgtcccgtccatgtcggatttggtgacccaggcccttgcagcccgtgaacattcaaagaaacaagaaacacgggagtggttcctttcctgatttacgcatgtcatgcatgcgtcgaagatccagtcgcagcctgaccgcatcacacatcaaggcgttacagcctctccgtctttgctgcacccaagtgtattcgtgtgaccgcgttgagggatctaatggattcggaactttggtcgtttggtctctcatgctgcccaatcccatgcgcttttctccgtgcctctctgtctccccttccgttctatttggacaacgatgtgtactgtaatgcgtgcgccatctgacaacgaatagatcagcagcattcgcacacttgcacatacccagtgaagcttttgtgtctgtcgtattgacaacaccgactgcaacaaggtgtagatagaagttggccttctcgctcgctcgcacgctcttcacgctcctgctttccttgctgtgccttgccaccatgatcgcgagcagcgtgcgccacgcggtgatcctgctgctggtggcggtggcgatgatggtgaacaacgtgatcgcggacatccagatgacgcagagcccgagcagcctgagcgcgagcgtgggcgaccgcgtgacgatcacgtgccgcgcgagccagggcatccgcaactacctggcgtggtatcagcagaagccgggcaaggcgccgaagctgctgatctacgcggcgagcacgctgcagagcggcgtgccgagccgcttcagcggcagcggcagcggcacggacttcacgctgacgatcagcagcctgcagccggaggacgtggcgacgtactactgccagcgctacaaccgcgcgccgtacacgttcggccagggcacgaaggtggagatcaagcgcacggtggcggcgccgagcgtgttcatcttcccgccgagcgacgagcagctgaagagcggcacggcgagcgtggtgtgcctgctgaacaacttctacccgcgcgaggcgaaggtgcagtggaaggtggacaacgcgctgcagagcggcaacagccaggagagcgtgacggagcaggacagcaaggacagcacgtacagcctgagcagcacgctgacgctgagcaaggcggactacgagaagcacaaggtgtacgcgtgcgaggtgacgcaccagggcctgagcagcccggtgacgaagagcttcaaccgcggcgagtgctaactcgagggaggaggaggaggcgcgtagcattgcgtgcgggttatgtgtgcgtgcgtgtgtgtgtgcggtgcgcgcctttcctcttttttttctccctctcgtcggttttttttttctgaggagacggggcgaagacgcgagcggggggcggcgtttgtgtgtgtgtgtgcgcgtgtcgggggcagcggtgttggcggaacggccaacgccctgccccctccccgccctgcgacgtttctgcgcacccgttctctccttcctgcgtgcgtgtctgcgcgcatgcacatctgtccgcgtgtgccgcagcgctggtatttttgtgagggcagagccctgcctccccgcctctctgccgttggcaggtgaagcgaaaacgaggtaccatttaaatatcccaatggcgcgccgagcttggctcgagcatggtcatagctgtttcctgtgtgaaattgttatccgctcacaattccacacaacatacgagccggaagcataaagtgtaaagcctggggtgcctaatgagtgagctaactcacattaattgcgttgcgctcactgcccgctttccagtcgggaaacctgtcgtgccagctgcattaatgaatcggccaacgcgcggggagaggcggtttgcgtattgggcgctcttccgcttcctcgctcactgactcgctgcgctcggtcgttcggctgcggcgagcggtatcagctcactcaaaggcggtaatacggttatccacagaatcaggggataacgcaggaaagaacatgtgagcaaaaggccagcaaaaggccaggaaccgtaaaaaggccgcgttgctggcgtttttccataggctccgcccccctgacgagcatcacaaaaatcgacgctcaagtcagaggtggcgaaacccgacaggactataaagataccaggcgtttccccctggaagctccctcgtgcgctctcctgttccgaccctgccgcttaccggatacctgtccgcctttctcccttcgggaagcgtggcgctttctcatagctcacgctgtaggtatctcagttcggtgtaggtcgttcgctccaagctgggctgtgtgcacgaaccccccgttcagcccgaccgctgcgccttatccggtaactatcgtcttgagtccaacccggtaagacacgacttatcgccactggcagcagccactggtaacaggattagcagagcgaggtatgtaggcggtgctacagagttcttgaagtggtggcctaactacggctacactagaagaacagtatttggtatctgcgctctgctgaagccagttaccttcggaaaaagagttggtagctcttgatccggcaaacaaaccaccgctggtagcggtggtttttttgtttgcaagcagcagattacgcgcagaaaaaaaggatctcaagaagatcctttgatcttttctacggggtctgacgctcagtggaacgaaaactcacgttaagggattttggtcatgagattatcaaaaaggatcttcacctagatccttttaaattaaaaatgaagttttaaatcaatctaaagtatatatgagtaaacttggtctgacagttagaaaaactcatcgagcatcaaatgaaactgcaatttattcatatcaggattatcaataccatatttttgaaaaagccgtttctgtaatgaaggagaaaactcaccgaggcagttccataggatggcaagatcctggtatcggtctgcgattccgactcgtccaacatcaatacaacctattaatttcccctcgtcaaaaataaggttatcaagtgagaaatcaccatgagtgacgactgaatccggtgagaatggcaaaagtttatgcatttctttccagacttgttcaacaggccagccattacgctcgtcatcaaaatcactcgcatcaaccaaaccgttattcattcgtgattgcgcctgagcgagacgaaatacgcgatcgctgttaaaaggacaattacaaacaggaatcgaatgcaaccggcgcaggaacactgccagcgcatcaacaatattttcacctgaatcaggatattcttctaatacctggaatgctgttttcccagggatcgcagtggtgagtaaccatgcatcatcaggagtacggataaaatgcttgatggtcggaagaggcataaattccgtcagccagtttagtctgaccatctcatctgtaacatcattggcaacgctacctttgccatgtttcagaaacaactctggcgcatcgggcttcccatacaatcgatagattgtcgcacctgattgcccgacattatcgcgagcccatttatacccatataaatcagcatccatgttggaatttaatcgcggcctagagcaagacgtttcccgttgaatatggctcatactcttcctttttcaatattattgaagcatttatcagggttattgtctcatgagcggatacatatttgaatgtatttagaaaaataaacaaataggggttccgcgcacatttccccgaaaagtgccacctgacgtctaagaaaccattattatcatgacattaacctataaaaataggcgtatcacgaggccctttcgtc

SEQ ID NO: 244 - DNA, 4008 bp, Artificial Sequence
  pLMTB7084
tcgcgcgtttcggtgatgacggtgaaaacctctgacacatgcagctcccggagacggtcacagcttgtctgtaagcggatgccgggagcagacaagcccgtcagggcgcgtcagcgggtgttggcgggtgtcggggctggcttaactatgcggcatcagagcagattgtactgagagtgcaccatatgcggtgtgaaataccgcacagatgcgtaaggagaaaataccgcatcaggcgccattcgccattcaggctgcgcaactgttgggaagggcgatcggtgcgggcctcttcgctattacgccagctggcgaaagggggatgtgctgcaaggcgattaagttgggtaacgccagggttttcccagtcacgacgttgtaaaacgacggccagtgaattgacgcgtattgggatatttaaatggtacctggaacagcggcgcgctgacgagcggcgtgcacacgttcccggcggtgctgcagagcagcggcctgtacagcctgagcagcgtggtgacggtgccgagcagcagcctgggcacgcagacgtacatctgcaacgtgaaccacaagccgagcaacacgaaggtggacaagaaggtggagccgaagagctgcgacaagacgcacacgtgcccgccgtgcccggcgccggagctgctgggcggcccgagcgtgttcctgttcccgccgaagccgaaggacacgctgatgatcagccgcacgccggaggtgacgtgcgtggtggtggacgtgagccacgaggacccggaggtgaagttcaactggtacgtggacggcgtggaggtgcacaacgcgaagacgaagccgcgcgaggagcagtacaacagcacgtaccgcgtggtgagcgtgctgacggtgctgcaccaggactggctgaacggcaaggagtacaagtgcaaggtgagcaacaaggcgctgccggcgccgatcgagaagacgatcagcaaggcgaagggccagccgcgcgagccgcaggtgtacacgctgccgccgagccgcgacgagctgacgaagaaccaggtgagcctgacgtgcctggtgaagggcttctacccgagcgacatcgcggtggagtgggagagcaacggccagccggagaacaactacaagacgacgccgccggtgctggacagcgacggcagcttcttcctgtacagcaagctgacggtggacaagagccgctggcagcagggcaacgtgttcagctgcagcgtgatgcacgaggcgctgcacaaccactacacgcagaagagcctgagcctgagcccgggcaagtaacctcctcctcctttcttgttcctttcacgtcgccttctcggttgtagctggcagacgacgagtcttacttttacgtgtacttctctatagatgatgtatgatctctctgcatgcgtgttcgtgcatgtgtccgtgtgttgtgtacgcgtgcgtctcgcctcagctctccgcgtgaaagggtttgactgcccatgatgcgtgtgtatatccacgcgcaggcacgcacacacacacacacacacacacacacaggcacacacaggcacacaaacgcatctcaggccgagccgcatacgtctctcgcacggtctcgtttatttgatcatgtagttgagtattaaattgggaagacaaaaacataatagcacgaagagtcgggcacgaaaagcccgatctctctctctctctctcgtgcgcgcaggggcgtgtgggtgcacgacgacgaggacggaggggggaagggaggcataaacggatcgatggtaccatttaaatatcccaatggcgcgccgagcttggctcgagcatggtcatagctgtttcctgtgtgaaattgttatccgctcacaattccacacaacatacgagccggaagcataaagtgtaaagcctggggtgcctaatgagtgagctaactcacattaattgcgttgcgctcactgcccgctttccagtcgggaaacctgtcgtgccagctgcattaatgaatcggccaacgcgcggggagaggcggtttgcgtattgggcgctcttccgcttcctcgctcactgactcgctgcgctcggtcgttcggctgcggcgagcggtatcagctcactcaaaggcggtaatacggttatccacagaatcaggggataacgcaggaaagaacatgtgagcaaaaggccagcaaaaggccaggaaccgtaaaaaggccgcgttgctggcgtttttccataggctccgcccccctgacgagcatcacaaaaatcgacgctcaagtcagaggtggcgaaacccgacaggactataaagataccaggcgtttccccctggaagctccctcgtgcgctctcctgttccgaccctgccgcttaccggatacctgtccgcctttctcccttcgggaagcgtggcgctttctcatagctcacgctgtaggtatctcagttcggtgtaggtcgttcgctccaagctgggctgtgtgcacgaaccccccgttcagcccgaccgctgcgccttatccggtaactatcgtcttgagtccaacccggtaagacacgacttatcgccactggcagcagccactggtaacaggattagcagagcgaggtatgtaggcggtgctacagagttcttgaagtggtggcctaactacggctacactagaagaacagtatttggtatctgcgctctgctgaagccagttaccttcggaaaaagagttggtagctcttgatccggcaaacaaaccaccgctggtagcggtggtttttttgtttgcaagcagcagattacgcgcagaaaaaaaggatctcaagaagatcctttgatcttttctacggggtctgacgctcagtggaacgaaaactcacgttaagggattttggtcatgagattatcaaaaaggatcttcacctagatccttttaaattaaaaatgaagttttaaatcaatctaaagtatatatgagtaaacttggtctgacagttagaaaaactcatcgagcatcaaatgaaactgcaatttattcatatcaggattatcaataccatatttttgaaaaagccgtttctgtaatgaaggagaaaactcaccgaggcagttccataggatggcaagatcctggtatcggtctgcgattccgactcgtccaacatcaatacaacctattaatttcccctcgtcaaaaataaggttatcaagtgagaaatcaccatgagtgacgactgaatccggtgagaatggcaaaagtttatgcatttctttccagacttgttcaacaggccagccattacgctcgtcatcaaaatcactcgcatcaaccaaaccgttattcattcgtgattgcgcctgagcgagacgaaatacgcgatcgctgttaaaaggacaattacaaacaggaatcgaatgcaaccggcgcaggaacactgccagcgcatcaacaatattttcacctgaatcaggatattcttctaatacctggaatgctgttttcccagggatcgcagtggtgagtaaccatgcatcatcaggagtacggataaaatgcttgatggtcggaagaggcataaattccgtcagccagtttagtctgaccatctcatctgtaacatcattggcaacgctacctttgccatgtttcagaaacaactctggcgcatcgggcttcccatacaatcgatagattgtcgcacctgattgcccgacattatcgcgagcccatttatacccatataaatcagcatccatgttggaatttaatcgcggcctagagcaagacgtttcccgttgaatatggctcatactcttcctttttcaatattattgaagcatttatcagggttattgtctcatgagcggatacatatttgaatgtatttagaaaaataaacaaataggggttccgcgcacatttccccgaaaagtgccacctgacgtctaagaaaccattattatcatgacattaacctataaaaataggcgtatcacgaggccctttcgtc

SEQ ID NO: 245 - DNA, 4439 bp, Artificial Sequence
  pLMTB8223
tcgcgcgtttcggtgatgacggtgaaaacctctgacacatgcagctcccggagacggtcacagcttgtctgtaagcggatgccgggagcagacaagcccgtcagggcgcgtcagcgggtgttggcgggtgtcggggctggcttaactatgcggcatcagagcagattgtactgagagtgcaccatatgcggtgtgaaataccgcacagatgcgtaaggagaaaataccgcatcaggcgccattcgccattcaggctgcgcaactgttgggaagggcgatcggtgcgggcctcttcgctattacgccagctggcgaaagggggatgtgctgcaaggcgattaagttgggtaacgccagggttttcccagtcacgacgttgtaaaacgacggccagtgaattgacgcgtattgggatatttaaatccacacaataccaccgtgcacacgcacagcttctctctcccccccccacctatacacacatactcacacagagagagagacagagacagagaggggaggagaggggcacagagagcgacgcacagggtgacgaggaaagcagtatcgaaacagtgaccagcaggaacgttcctgccggtgtccacttgtgcccgtgctccactacgggccggtcaaccaacggacacccgcaccgccccccacgccaagagtccaaccagccatcacctcgagagcctgctgccgcgcccgcacgccccacgccccagtggccggcatcccccccccccacacacacacgggaatcccctgagcgacacgcacgccacacaggaacacatgaaaaggtgagagaggaccaccgcagagggcggccatggggaggaagaagaagaggaggaggagggggaggaggaggacacgtgcgagcgcgccacctcggtcacatcatcattctccctgcgtggggatggatcgcgagggacgcggggtttgagggccgtgggtggtgtggagagtgtggttgattattgtatggtggtgagggtggaaggtgtggcggggatggtggtgcggtggtgtcggaaggggtgtgtgagagggcgcgggtccttgagggagggtgggtgtgttgttgttttgcgggtgttatccggggcttgggtgttggtgtgattggtgactatgtaggggtgaagggtgagtggagggggtcgccagaggcgttccgttctacgaagcttcattcctatgtccgactccgaagcatgcctgcagttctgctggctatgtgggcgtgtctgggcaacgactgaattgagaaggggagtcgaaacggtgcgtggatgctgtgtttgtgctacacacaagcaaaggcaacaacacaagcgcatcgagccagacgaaccaacccaatattcacacaactgtacgtggccgcgcgctgtatctccgatgggatgatgcgtgtgcgtgtgccaccaccacgtactagtttccagccttactgcttgtataccttgtcttttgcgttgtgcttgcgcgtgctgtgtacctctgctcgtgcgttccgtatcccgggacctgcgggcggtgggtgccacacaacccgtcacattcaacatcactcatacatctcaccgatgtgtgcgtgtgcttgctgtgtgcgtgtgttgtgtggcgtcaaacctgtttgaaaacacacccctagcactattcgaccgcgaaagcgcccccccaaaggggccggtgtgcaatgcgagctacatgtatgtgtagagagcgctgcgccgaactagtcgtgcgtgctgaacatgttttgtgtgtgctgccgtgtctacacgtttgcagcggaaactcggttgaaccagaaacagaacttgattgttgctgcatttcgaggaatttcagccaaacaagaggtcaacaaccaagccgcgtgtacacatatacacacaccgcgtgtatgtatatatgcgtttgttttgttaccacaaatactgagttgtctgatgtgagcttctgctacagacgcaattcaggaaatacaacaaaatacaacacttgatcatcaatgcgcaatgtgcgcgtgttgtgtgtgtgtgtgcgagcgcacacacacatgcacacgactcacgttgtcacacaattgagagctctctcttctccttcccctctctctcctctctcctctctccagagctctctcttctccttcccctctctctcctctctcctctctccagagctcgagccaccatttaaatatcccaatggcgcgccgagcttggctcgagcatggtcatagctgtttcctgtgtgaaattgttatccgctcacaattccacacaacatacgagccggaagcataaagtgtaaagcctggggtgcctaatgagtgagctaactcacattaattgcgttgcgctcactgcccgctttccagtcgggaaacctgtcgtgccagctgcattaatgaatcggccaacgcgcggggagaggcggtttgcgtattgggcgctcttccgcttcctcgctcactgactcgctgcgctcggtcgttcggctgcggcgagcggtatcagctcactcaaaggcggtaatacggttatccacagaatcaggggataacgcaggaaagaacatgtgagcaaaaggccagcaaaaggccaggaaccgtaaaaaggccgcgttgctggcgtttttccataggctccgcccccctgacgagcatcacaaaaatcgacgctcaagtcagaggtggcgaaacccgacaggactataaagataccaggcgtttccccctggaagctccctcgtgcgctctcctgttccgaccctgccgcttaccggatacctgtccgcctttctcccttcgggaagcgtggcgctttctcatagctcacgctgtaggtatctcagttcggtgtaggtcgttcgctccaagctgggctgtgtgcacgaaccccccgttcagcccgaccgctgcgccttatccggtaactatcgtcttgagtccaacccggtaagacacgacttatcgccactggcagcagccactggtaacaggattagcagagcgaggtatgtaggcggtgctacagagttcttgaagtggtggcctaactacggctacactagaagaacagtatttggtatctgcgctctgctgaagccagttaccttcggaaaaagagttggtagctcttgatccggcaaacaaaccaccgctggtagcggtggtttttttgtttgcaagcagcagattacgcgcagaaaaaaaggatctcaagaagatcctttgatcttttctacggggtctgacgctcagtggaacgaaaactcacgttaagggattttggtcatgagattatcaaaaaggatcttcacctagatccttttaaattaaaaatgaagttttaaatcaatctaaagtatatatgagtaaacttggtctgacagttagaaaaactcatcgagcatcaaatgaaactgcaatttattcatatcaggattatcaataccatatttttgaaaaagccgtttctgtaatgaaggagaaaactcaccgaggcagttccataggatggcaagatcctggtatcggtctgcgattccgactcgtccaacatcaatacaacctattaatttcccctcgtcaaaaataaggttatcaagtgagaaatcaccatgagtgacgactgaatccggtgagaatggcaaaagtttatgcatttctttccagacttgttcaacaggccagccattacgctcgtcatcaaaatcactcgcatcaaccaaaccgttattcattcgtgattgcgcctgagcgagacgaaatacgcgatcgctgttaaaaggacaattacaaacaggaatcgaatgcaaccggcgcaggaacactgccagcgcatcaacaatattttcacctgaatcaggatattcttctaatacctggaatgctgttttcccagggatcgcagtggtgagtaaccatgcatcatcaggagtacggataaaatgcttgatggtcggaagaggcataaattccgtcagccagtttagtctgaccatctcatctgtaacatcattggcaacgctacctttgccatgtttcagaaacaactctggcgcatcgggcttcccatacaatcgatagattgtcgcacctgattgcccgacattatcgcgagcccatttatacccatataaatcagcatccatgttggaatttaatcgcggcctagagcaagacgtttcccgttgaatatggctcatactcttcctttttcaatattattgaagcatttatcagggttattgtctcatgagcggatacatatttgaatgtatttagaaaaataaacaaataggggttccgcgcacatttccccgaaaagtgccacctgacgtctaagaaaccattattatcatgacattaacctataaaaataggcgtatcacgaggccctttcgtc

SEQ ID NO: 246 - DNA, 4039 bp, Artificial Sequence
  pLMTB8254
tcgcgcgtttcggtgatgacggtgaaaacctctgacacatgcagctcccggagacggtcacagcttgtctgtaagcggatgccgggagcagacaagcccgtcagggcgcgtcagcgggtgttggcgggtgtcggggctggcttaactatgcggcatcagagcagattgtactgagagtgcaccatatgcggtgtgaaataccgcacagatgcgtaaggagaaaataccgcatcaggcgccattcgccattcaggctgcgcaactgttgggaagggcgatcggtgcgggcctcttcgctattacgccagctggcgaaagggggatgtgctgcaaggcgattaagttgggtaacgccagggttttcccagtcacgacgttgtaaaacgacggccagtgaattgacgcgtattgggatatttaaatatgcgcctgcgtgagcctcttttgtcaggatcggcggctatgcccggagccagtctccagcgggcctgccggttgctcgttgccgtctgcgcgttgcacctgggggtcaccctggtctactacctggctggccgtgacctttcccgcttgccgcagttggtcggtgtatccaccccgctccaggggggctcgaacagcgcagcggcgataggacagtcttcgggcgagctgcgaaccggcggagcgcgcccacccccacccctgggcgcgagttcccagccccgcccgggtggtgacagctcgccggtggtagattcaggaccagggcccgccagtaacctcacgtcagtgccagtaccccacaccacggctttgagcctgcctgcttgcccggaggagagtcctctgcttgtaggaccaatgttgattgaatttaacatgcctgtggacctggagctggtggcgaagcagaatccaaacgtgaaaatgggcggtcggtacgcgcctcgcgattgcgtctcaccgcacaaggtagcgattataataccctttcgcaaccgacaagaacacctgaagtactggctctactatctccaccctgtcctgcagcgccagcagctggactacggcatttacgtgatcaaccaggcgggcgatactatctttaaccgtgcgaagctcctcaatgtagggtttcaggaggctctgaaggactacgactacacatgctttgtctttagcgacgtggatctcattccaatgaatgaccataacgcctaccgctgcttttcccagccgcgccatatctctgtggccatggacaagttcggcttctcgctgccatacgtgcagtacttcggaggcgtgtctgcactgagtaagcaacagttcctgaccattaacggcttccccaacaactattggggctggggcggggaagacgatgacatctttaaccggctggtcttccgaggtatgagcatttcgcgcccaaacgccgtcgtgggacgctgccggatgatacgacacagccgagacaaaaagaacgagcctaatccgcagcgcttcgaccgcatagctcacacgaaggagactatgttgagcgacggcctcaatagcttgacgtatcaggttttggatgtgcagcgttacccactgtacacacagatcactgtggatatcggtacgccttcttaattagcgctccgtagctcgctgcgtatgagaggtactgagctccaatgcatcacacggcgtacggcaacacacactatcttttcagtttatttttttaattatccctccaaaaagaagcaactgacacttcaaaatattcccaacaaggagcgtgaggtcagtgaccagtctcggacttcacaccgcgcatgtagaagcacatttaaatatcccaatggcgcgccgagcttggctcgagcatggtcatagctgtttcctgtgtgaaattgttatccgctcacaattccacacaacatacgagccggaagcataaagtgtaaagcctggggtgcctaatgagtgagctaactcacattaattgcgttgcgctcactgcccgctttccagtcgggaaacctgtcgtgccagctgcattaatgaatcggccaacgcgcggggagaggcggtttgcgtattgggcgctcttccgcttcctcgctcactgactcgctgcgctcggtcgttcggctgcggcgagcggtatcagctcactcaaaggcggtaatacggttatccacagaatcaggggataacgcaggaaagaacatgtgagcaaaaggccagcaaaaggccaggaaccgtaaaaaggccgcgttgctggcgtttttccataggctccgcccccctgacgagcatcacaaaaatcgacgctcaagtcagaggtggcgaaacccgacaggactataaagataccaggcgtttccccctggaagctccctcgtgcgctctcctgttccgaccctgccgcttaccggatacctgtccgcctttctcccttcgggaagcgtggcgctttctcatagctcacgctgtaggtatctcagttcggtgtaggtcgttcgctccaagctgggctgtgtgcacgaaccccccgttcagcccgaccgctgcgccttatccggtaactatcgtcttgagtccaacccggtaagacacgacttatcgccactggcagcagccactggtaacaggattagcagagcgaggtatgtaggcggtgctacagagttcttgaagtggtggcctaactacggctacactagaagaacagtatttggtatctgcgctctgctgaagccagttaccttcggaaaaagagttggtagctcttgatccggcaaacaaaccaccgctggtagcggtggtttttttgtttgcaagcagcagattacgcgcagaaaaaaaggatctcaagaagatcctttgatcttttctacggggtctgacgctcagtggaacgaaaactcacgttaagggattttggtcatgagattatcaaaaaggatcttcacctagatccttttaaattaaaaatgaagttttaaatcaatctaaagtatatatgagtaaacttggtctgacagttagaaaaactcatcgagcatcaaatgaaactgcaatttattcatatcaggattatcaataccatatttttgaaaaagccgtttctgtaatgaaggagaaaactcaccgaggcagttccataggatggcaagatcctggtatcggtctgcgattccgactcgtccaacatcaatacaacctattaatttcccctcgtcaaaaataaggttatcaagtgagaaatcaccatgagtgacgactgaatccggtgagaatggcaaaagtttatgcatttctttccagacttgttcaacaggccagccattacgctcgtcatcaaaatcactcgcatcaaccaaaccgttattcattcgtgattgcgcctgagcgagacgaaatacgcgatcgctgttaaaaggacaattacaaacaggaatcgaatgcaaccggcgcaggaacactgccagcgcatcaacaatattttcacctgaatcaggatattcttctaatacctggaatgctgttttcccagggatcgcagtggtgagtaaccatgcatcatcaggagtacggataaaatgcttgatggtcggaagaggcataaattccgtcagccagtttagtctgaccatctcatctgtaacatcattggcaacgctacctttgccatgtttcagaaacaactctggcgcatcgggcttcccatacaatcgatagattgtcgcacctgattgcccgacattatcgcgagcccatttatacccatataaatcagcatccatgttggaatttaatcgcggcctagagcaagacgtttcccgttgaatatggctcatactcttcctttttcaatattattgaagcatttatcagggttattgtctcatgagcggatacatatttgaatgtatttagaaaaataaacaaataggggttccgcgcacatttccccgaaaagtgccacctgacgtctaagaaaccattattatcatgacattaacctataaaaataggcgtatcacgaggccctttcgtc

SEQ ID NO: 247 - DNA, 3861 bp, Artificial Sequence
  pLMTB8281
tcgcgcgtttcggtgatgacggtgaaaacctctgacacatgcagctcccggagacggtcacagcttgtctgtaagcggatgccgggagcagacaagcccgtcagggcgcgtcagcgggtgttggcgggtgtcggggctggcttaactatgcggcatcagagcagattgtactgagagtgcaccatatgcggtgtgaaataccgcacagatgcgtaaggagaaaataccgcatcaggcgccattcgccattcaggctgcgcaactgttgggaagggcgatcggtgcgggcctcttcgctattacgccagctggcgaaagggggatgtgctgcaaggcgattaagttgggtaacgccagggttttcccagtcacgacgttgtaaaacgacggccagtgaattgacgcgtattgggatatttaaatggtagactcgtgccgcgcgctgatgatgtaggtgcacgcgtgcgtgtgctgcagcggagccgccgccaccgcgactgtgtgtgtgtgcgcgcgtgacgaccggctcgaggaaggaggagcgcgcgtgtgcgtgcgatgcgcctcctctttttttttcgccctcgtcggtttttttttttctgagaggacggcggcggcggatggcggggcggcggcgctgacggagcggccacgctctgcacctccccgccctccgccgtctctccgttcgccgtcctctccttcctcgtgcgtgcgtctgccgcgcatgcacacgcgcgcgcgttgccgtagcgctgtgtatctgtggaggagggccttgtctctccctccccgtcgctgagagatgaaggggcaaaaagagagagcagtgcgcatgtgtgcctccgctccctggagctccccacgagccccctgcgccacgcacctgcgaacctgcacagcggcccacctgcccgcacacgtgagcagaaatgggtgtgtggagcgggtgatgtcggcgcgcacacgcgcgcgcgctgaccactccgacgtgaaaacacggaagagcgaggctggcaaggcagggcaggaacctgatcacgtgcgcgcgcacaaacggaatgagcagctcctgaagaggagatggggctcatgcacgcagacacgcacgtgcacactcctccgtcttcacggagcgcggccctgctgctgctgccatgtgccggacgtctgccacgcgtctcttccccacaccttgctcttcccccccccccttccctcccggcgaacacaaaacacgcgcacgcccaccgaaacaacaacgcgcagctcttcgctctcgttcttcgaacaaacacctttaaaccgccttccaacccctctttcttctttttcagccatggccaagcctttgtctcaagaagaatccaccctcattgaaagagcaacggctacaatcaacagcatccccatctctgaagactacagcgtcgccagcgcagctctctctagcgacggccgcatcttcactggtgtcaatgtatatcattttactgggggaccttgtgcagaactcgtggtgctgggcactgctgctgctgcggcagctggcaacctgacttgtatcgtcgcgatcggaaatgagaacaggggcatcttgagcccctgcggacggtgccgacaggtgcttctcgatctgatttaaatatcccaatggcgcgccgagcttggctcgagcatggtcatagctgtttcctgtgtgaaattgttatccgctcacaattccacacaacatacgagccggaagcataaagtgtaaagcctggggtgcctaatgagtgagctaactcacattaattgcgttgcgctcactgcccgctttccagtcgggaaacctgtcgtgccagctgcattaatgaatcggccaacgcgcggggagaggcggtttgcgtattgggcgctcttccgcttcctcgctcactgactcgctgcgctcggtcgttcggctgcggcgagcggtatcagctcactcaaaggcggtaatacggttatccacagaatcaggggataacgcaggaaagaacatgtgagcaaaaggccagcaaaaggccaggaaccgtaaaaaggccgcgttgctggcgtttttccataggctccgcccccctgacgagcatcacaaaaatcgacgctcaagtcagaggtggcgaaacccgacaggactataaagataccaggcgtttccccctggaagctccctcgtgcgctctcctgttccgaccctgccgcttaccggatacctgtccgcctttctcccttcgggaagcgtggcgctttctcatagctcacgctgtaggtatctcagttcggtgtaggtcgttcgctccaagctgggctgtgtgcacgaaccccccgttcagcccgaccgctgcgccttatccggtaactatcgtcttgagtccaacccggtaagacacgacttatcgccactggcagcagccactggtaacaggattagcagagcgaggtatgtaggcggtgctacagagttcttgaagtggtggcctaactacggctacactagaagaacagtatttggtatctgcgctctgctgaagccagttaccttcggaaaaagagttggtagctcttgatccggcaaacaaaccaccgctggtagcggtggtttttttgtttgcaagcagcagattacgcgcagaaaaaaaggatctcaagaagatcctttgatcttttctacggggtctgacgctcagtggaacgaaaactcacgttaagggattttggtcatgagattatcaaaaaggatcttcacctagatccttttaaattaaaaatgaagttttaaatcaatctaaagtatatatgagtaaacttggtctgacagttagaaaaactcatcgagcatcaaatgaaactgcaatttattcatatcaggattatcaataccatatttttgaaaaagccgtttctgtaatgaaggagaaaactcaccgaggcagttccataggatggcaagatcctggtatcggtctgcgattccgactcgtccaacatcaatacaacctattaatttcccctcgtcaaaaataaggttatcaagtgagaaatcaccatgagtgacgactgaatccggtgagaatggcaaaagtttatgcatttctttccagacttgttcaacaggccagccattacgctcgtcatcaaaatcactcgcatcaaccaaaccgttattcattcgtgattgcgcctgagcgagacgaaatacgcgatcgctgttaaaaggacaattacaaacaggaatcgaatgcaaccggcgcaggaacactgccagcgcatcaacaatattttcacctgaatcaggatattcttctaatacctggaatgctgttttcccagggatcgcagtggtgagtaaccatgcatcatcaggagtacggataaaatgcttgatggtcggaagaggcataaattccgtcagccagtttagtctgaccatctcatctgtaacatcattggcaacgctacctttgccatgtttcagaaacaactctggcgcatcgggcttcccatacaatcgatagattgtcgcacctgattgcccgacattatcgcgagcccatttatacccatataaatcagcatccatgttggaatttaatcgcggcctagagcaagacgtttcccgttgaatatggctcatactcttcctttttcaatattattgaagcatttatcagggttattgtctcatgagcggatacatatttgaatgtatttagaaaaataaacaaataggggttccgcgcacatttccccgaaaagtgccacctgacgtctaagaaaccattattatcatgacattaacctataaaaataggcgtatcacgaggccctttcgtc

SEQ ID NO: 248 - DNA, 3499 bp, Artificial Sequence
  pLMTB8333
tcgcgcgtttcggtgatgacggtgaaaacctctgacacatgcagctcccggagacggtcacagcttgtctgtaagcggatgccgggagcagacaagcccgtcagggcgcgtcagcgggtgttggcgggtgtcggggctggcttaactatgcggcatcagagcagattgtactgagagtgcaccatatgcggtgtgaaataccgcacagatgcgtaaggagaaaataccgcatcaggcgccattcgccattcaggctgcgcaactgttgggaagggcgatcggtgcgggcctcttcgctattacgccagctggcgaaagggggatgtgctgcaaggcgattaagttgggtaacgccagggttttcccagtcacgacgttgtaaaacgacggccagtgaattgacgcgtattgggatatttaaatgcagaatttggatgatgcgattacttgagataatttcattttcatcagcaaaaacgaagtgcaacggtatctttggttcaccagaggccggcaaagctcttagggtggtgtaatgggctgttagcgctacggtacactgaagcgatcagctgcggtatctgtgtgagcgtcaagggtgcgctggtttctgcatctccgagtttttgattcgctctgaggatgtatcgcaaaaagcacgctgcggtgctgctttactactcctgcgctgctgctccttcaaatgcgtcgacatgtccgattttctgcagctactcgcctccactttcatctctccctcttccttgttgttttctgtgtgtccatgcgccttgtgtgcgtctcaacttgcgacaacttttctttcgcgtctctgtggaataacatctgaacagctttagggcttcattcgcaacggatcatgaccgagtacaagccgaccgtgcgcctggcgacacgcgacgacgtgccacgcgcagtgcgcacactggcggcagcgtttgcggactacccggcgacacgccacacagtggacccggaccgccacatcgagcgcgtgacagagctgcaggagctgttcctgacgcgcgtgggcctggacatcggcaaggtctgggtggcagacgacggcgcagcggtggcagtgtggacgacaccagagagcgtcgaggcaggcgcggtgttcgcagagattggcccacgcatggcggagctgagcggcagccgcctggcagcacagcagcagatggagggcctgctggcaccgcaccgcccaaaggagccagcctggtttctggcgacagtgggcgtgtccccggaccatttaaatatcccaatggcgcgccgagcttggctcgagcatggtcatagctgtttcctgtgtgaaattgttatccgctcacaattccacacaacatacgagccggaagcataaagtgtaaagcctggggtgcctaatgagtgagctaactcacattaattgcgttgcgctcactgcccgctttccagtcgggaaacctgtcgtgccagctgcattaatgaatcggccaacgcgcggggagaggcggtttgcgtattgggcgctcttccgcttcctcgctcactgactcgctgcgctcggtcgttcggctgcggcgagcggtatcagctcactcaaaggcggtaatacggttatccacagaatcaggggataacgcaggaaagaacatgtgagcaaaaggccagcaaaaggccaggaaccgtaaaaaggccgcgttgctggcgtttttccataggctccgcccccctgacgagcatcacaaaaatcgacgctcaagtcagaggtggcgaaacccgacaggactataaagataccaggcgtttccccctggaagctccctcgtgcgctctcctgttccgaccctgccgcttaccggatacctgtccgcctttctcccttcgggaagcgtggcgctttctcatagctcacgctgtaggtatctcagttcggtgtaggtcgttcgctccaagctgggctgtgtgcacgaaccccccgttcagcccgaccgctgcgccttatccggtaactatcgtcttgagtccaacccggtaagacacgacttatcgccactggcagcagccactggtaacaggattagcagagcgaggtatgtaggcggtgctacagagttcttgaagtggtggcctaactacggctacactagaagaacagtatttggtatctgcgctctgctgaagccagttaccttcggaaaaagagttggtagctcttgatccggcaaacaaaccaccgctggtagcggtggtttttttgtttgcaagcagcagattacgcgcagaaaaaaaggatctcaagaagatcctttgatcttttctacggggtctgacgctcagtggaacgaaaactcacgttaagggattttggtcatgagattatcaaaaaggatcttcacctagatccttttaaattaaaaatgaagttttaaatcaatctaaagtatatatgagtaaacttggtctgacagttagaaaaactcatcgagcatcaaatgaaactgcaatttattcatatcaggattatcaataccatatttttgaaaaagccgtttctgtaatgaaggagaaaactcaccgaggcagttccataggatggcaagatcctggtatcggtctgcgattccgactcgtccaacatcaatacaacctattaatttcccctcgtcaaaaataaggttatcaagtgagaaatcaccatgagtgacgactgaatccggtgagaatggcaaaagtttatgcatttctttccagacttgttcaacaggccagccattacgctcgtcatcaaaatcactcgcatcaaccaaaccgttattcattcgtgattgcgcctgagcgagacgaaatacgcgatcgctgttaaaaggacaattacaaacaggaatcgaatgcaaccggcgcaggaacactgccagcgcatcaacaatattttcacctgaatcaggatattcttctaatacctggaatgctgttttcccagggatcgcagtggtgagtaaccatgcatcatcaggagtacggataaaatgcttgatggtcggaagaggcataaattccgtcagccagtttagtctgaccatctcatctgtaacatcattggcaacgctacctttgccatgtttcagaaacaactctggcgcatcgggcttcccatacaatcgatagattgtcgcacctgattgcccgacattatcgcgagcccatttatacccatataaatcagcatccatgttggaatttaatcgcggcctagagcaagacgtttcccgttgaatatggctcatactcttcctttttcaatattattgaagcatttatcagggttattgtctcatgagcggatacatatttgaatgtatttagaaaaataaacaaataggggttccgcgcacatttccccgaaaagtgccacctgacgtctaagaaaccattattatcatgacattaacctataaaaataggcgtatcacgaggccctttcgtc

SEQ ID NO: 249 - DNA, 4417 bp, Artificial Sequence
  pLMTB8381
tcgcgcgtttcggtgatgacggtgaaaacctctgacacatgcagctcccggagacggtcacagcttgtctgtaagcggatgccgggagcagacaagcccgtcagggcgcgtcagcgggtgttggcgggtgtcggggctggcttaactatgcggcatcagagcagattgtactgagagtgcaccatatgcggtgtgaaataccgcacagatgcgtaaggagaaaataccgcatcaggcgccattcgccattcaggctgcgcaactgttgggaagggcgatcggtgcgggcctcttcgctattacgccagctggcgaaagggggatgtgctgcaaggcgattaagttgggtaacgccagggttttcccagtcacgacgttgtaaaacgacggccagtgaattgacgcgtattgggatatttaaataacacttgatcatcaatgcgcaatgtgcgcgtgttgtgtgtgtgtgtgcgagcgcacacacacatgcacacgactcacgttgtcacacaattgagagctctctcttctccttcccctctctctcctctctcctctctccagagctctctcttctccttcccctctctctcctctctcctctctccagagctcgagccaccatggtccgcaagaagggatctctgatcctgtgtggggcgtttctgttcgtggcctggaacgcgctcttgctcctttttttgtggggccgcccgcccattggtcgactcggcgagggtgggggggcggagccgggcgcgggcgaggagtggggtgcggggaagagcaaagtgggtggcgctaacggcctggcgggtgaggttatccgcctggcggaggaggtcgagagtgagctggagacgcagaagaagcttctgaaacagatacagtcgcaccgcgagctttgggaacagcgtaaggaactggagaagcgtgaaagcgaggataccaaggacgagaagattgacgttgagcctaagaagccccgccagatcccggccgtgcacctgtcccacaaggtggtggaagacgcccagacagtaaccaagaaaatgcaaacgctgatggtgacaccgcctcagctggtgatgaaggagcaggagacagatcagaagaataagcagatgatggaggaccagctggggctcaccacgccatctccgcaaatcatcatcccgattctcgtgatcgcgtgcgatcgcgtgaccgtgaagcggtccctcgaccgtctgatccagtaccggccaagcgcagagttgtacccaattatcgtcagccaggattgtggccacgctgacacagcccgcgtgatcgggtcctatggcagccagatcacgcacataagccagcctgaccttgcagatataccggtgcggccagatcatcgcaagtttcaggggtactacaagatcgcccgccattaccgttgggcgctcaaccaggtgttcaacgtgtttgcctactcaacggtggtgatagtcgaggacgacctggaggtggcgcctgacttcttcgagtactttcgagctctctatccgatcttgcgctcagatcctaccttgtggtgcatttcggcttggaacgataacgggcgtgatggtctcgtggatcccgggaaggccgagctcctctaccgcacggacttctttcctggactgggttggatgttgcttaaggaggtgtgggcggaactcgaacccaagtggccaaaggcgttctgggacgactggatgcgacacccggagcagcgtaaaaatcgctcttgcatccgaccggaaattagtcggacgatcacattcggtcgtaaaggtgtgtccttggggcagttcttcgaccagtatctccgttacattaagctcaacactgaattcgtccctttcacgaagcacgacctcagctatcttgtgcgagagaagtacgatgttagctttgaaaaagatgtatactcggctcccctcgtaaaggtagaggagctgcagcacggcggcagccttaagggcagcggccccttccgagtacagtactcgagccgagacagtttcaaggtccttgcccgcaacctcggggtgatggatgacctgaagtcaggcgtgccacgcgccggttaccgcggcgtggtctcgttcatatctcgcggccggcgcatctacctcgcgccccctgagggttggacgaaatacgacgtgagctggagctaaatttaaatatcccaatggcgcgccgagcttggctcgagcatggtcatagctgtttcctgtgtgaaattgttatccgctcacaattccacacaacatacgagccggaagcataaagtgtaaagcctggggtgcctaatgagtgagctaactcacattaattgcgttgcgctcactgcccgctttccagtcgggaaacctgtcgtgccagctgcattaatgaatcggccaacgcgcggggagaggcggtttgcgtattgggcgctcttccgcttcctcgctcactgactcgctgcgctcggtcgttcggctgcggcgagcggtatcagctcactcaaaggcggtaatacggttatccacagaatcaggggataacgcaggaaagaacatgtgagcaaaaggccagcaaaaggccaggaaccgtaaaaaggccgcgttgctggcgtttttccataggctccgcccccctgacgagcatcacaaaaatcgacgctcaagtcagaggtggcgaaacccgacaggactataaagataccaggcgtttccccctggaagctccctcgtgcgctctcctgttccgaccctgccgcttaccggatacctgtccgcctttctcccttcgggaagcgtggcgctttctcatagctcacgctgtaggtatctcagttcggtgtaggtcgttcgctccaagctgggctgtgtgcacgaaccccccgttcagcccgaccgctgcgccttatccggtaactatcgtcttgagtccaacccggtaagacacgacttatcgccactggcagcagccactggtaacaggattagcagagcgaggtatgtaggcggtgctacagagttcttgaagtggtggcctaactacggctacactagaagaacagtatttggtatctgcgctctgctgaagccagttaccttcggaaaaagagttggtagctcttgatccggcaaacaaaccaccgctggtagcggtggtttttttgtttgcaagcagcagattacgcgcagaaaaaaaggatctcaagaagatcctttgatcttttctacggggtctgacgctcagtggaacgaaaactcacgttaagggattttggtcatgagattatcaaaaaggatcttcacctagatccttttaaattaaaaatgaagttttaaatcaatctaaagtatatatgagtaaacttggtctgacagttagaaaaactcatcgagcatcaaatgaaactgcaatttattcatatcaggattatcaataccatatttttgaaaaagccgtttctgtaatgaaggagaaaactcaccgaggcagttccataggatggcaagatcctggtatcggtctgcgattccgactcgtccaacatcaatacaacctattaatttcccctcgtcaaaaataaggttatcaagtgagaaatcaccatgagtgacgactgaatccggtgagaatggcaaaagtttatgcatttctttccagacttgttcaacaggccagccattacgctcgtcatcaaaatcactcgcatcaaccaaaccgttattcattcgtgattgcgcctgagcgagacgaaatacgcgatcgctgttaaaaggacaattacaaacaggaatcgaatgcaaccggcgcaggaacactgccagcgcatcaacaatattttcacctgaatcaggatattcttctaatacctggaatgctgttttcccagggatcgcagtggtgagtaaccatgcatcatcaggagtacggataaaatgcttgatggtcggaagaggcataaattccgtcagccagtttagtctgaccatctcatctgtaacatcattggcaacgctacctttgccatgtttcagaaacaactctggcgcatcgggcttcccatacaatcgatagattgtcgcacctgattgcccgacattatcgcgagcccatttatacccatataaatcagcatccatgttggaatttaatcgcggcctagagcaagacgtttcccgttgaatatggctcatactcttcctttttcaatattattgaagcatttatcagggttattgtctcatgagcggatacatatttgaatgtatttagaaaaataaacaaataggggttccgcgcacatttccccgaaaagtgccacctgacgtctaagaaaccattattatcatgacattaacctataaaaataggcgtatcacgaggccctttcgtc

SEQ ID NO: 250 - DNA, 4174 bp, Artificial Sequence
  pLMTB8384
tcgcgcgtttcggtgatgacggtgaaaacctctgacacatgcagctcccggagacggtcacagcttgtctgtaagcggatgccgggagcagacaagcccgtcagggcgcgtcagcgggtgttggcgggtgtcggggctggcttaactatgcggcatcagagcagattgtactgagagtgcaccatatgcggtgtgaaataccgcacagatgcgtaaggagaaaataccgcatcaggcgccattcgccattcaggctgcgcaactgttgggaagggcgatcggtgcgggcctcttcgctattacgccagctggcgaaagggggatgtgctgcaaggcgattaagttgggtaacgccagggttttcccagtcacgacgttgtaaaacgacggccagtgaattgacgcgtattgggatatttaaatggtagactcgtgccgcgcgctgatgatgtaggtgcacgcgtgcgtgtgctgcagcggagccgccgccaccgcgactgtgtgtgtgtgcgcgcgtgacgaccggctcgaggaaggaggagcgcgcgtgtgcgtgcgatgcgcctcctctttttttttcgccctcgtcggtttttttttttctgagaggacggcggcggcggatggcggggcggcggcgctgacggagcggccacgctctgcacctccccgccctccgccgtctctccgttcgccgtcctctccttcctcgtgcgtgcgtctgccgcgcatgcacacgcgcgcgcgttgccgtagcgctgtgtatctgtggaggagggccttgtctctccctccccgtcgctgagagatgaaggggcaaaaagagagagcagtgcgcatgtgtgcctccgctccctggagctccccacgagccccctgcgccacgcacctgcgaacctgcacagcggcccacctgcccgcacacgtgagcagaaatgggtgtgtggagcgggtgatgtcggcgcgcacacgcgcgcgcgctgaccactccgacgtgaaaacacggaagagcgaggctggcaaggcagggcaggaacctgatcacgtgcgcgcgcacaaacggaatgagcagctcctgaagaggagatggggctcatgcacgcagacacgcacgtgcacactcctccgtcttcacggagcgcggccctgctgctgctgccatgtgccggacgtctgccacgcgtctcttccccacaccttgctcttcccccccccccttccctcccggcgaacacaaaacacgcgcacgcccaccgaaacaacaacgcgcagctcttcgctctcgttcttcgaacaaacacctttaaaccgccttccaacccctctttcttctttttcagccatgaaaaagcctgaactcaccgcgacgtctgtcgagaagtttctgatcgaaaagttcgacagcgtctccgacctgatgcagctctcggagggcgaagaatctcgtgctttcagcttcgatgtaggagggcgtggatatgtcctgcgggtaaatagctgcgccgatggtttctacaaagatcgttatgtttatcggcactttgcatcggccgcgctcccgattccggaagtgcttgacattggggaattcagcgagagcctgacctattgcatctcccgccgtgcacagggtgtcacgttgcaagacctgcctgaaaccgaactgcccgctgttctgcagccggtcgcggaggcgatggatgcgatcgctgcggccgatcttagccagacgagcgggttcggcccattcggaccgcaaggaatcggtcaatacactacatggcgtgatttcatatgcgcgattgctgatccccatgtgtatcactggcaaactgtgatggacgacaccgtcagtgcgtccgtcgcgcaggctctcgatgagctgatgctttgggccgaggactgccccgaagtccggcacctcgtgcacgcggatttcggctccaacaatgtccatttaaatatcccaatggcgcgccgagcttggctcgagcatggtcatagctgtttcctgtgtgaaattgttatccgctcacaattccacacaacatacgagccggaagcataaagtgtaaagcctggggtgcctaatgagtgagctaactcacattaattgcgttgcgctcactgcccgctttccagtcgggaaacctgtcgtgccagctgcattaatgaatcggccaacgcgcggggagaggcggtttgcgtattgggcgctcttccgcttcctcgctcactgactcgctgcgctcggtcgttcggctgcggcgagcggtatcagctcactcaaaggcggtaatacggttatccacagaatcaggggataacgcaggaaagaacatgtgagcaaaaggccagcaaaaggccaggaaccgtaaaaaggccgcgttgctggcgtttttccataggctccgcccccctgacgagcatcacaaaaatcgacgctcaagtcagaggtggcgaaacccgacaggactataaagataccaggcgtttccccctggaagctccctcgtgcgctctcctgttccgaccctgccgcttaccggatacctgtccgcctttctcccttcgggaagcgtggcgctttctcatagctcacgctgtaggtatctcagttcggtgtaggtcgttcgctccaagctgggctgtgtgcacgaaccccccgttcagcccgaccgctgcgccttatccggtaactatcgtcttgagtccaacccggtaagacacgacttatcgccactggcagcagccactggtaacaggattagcagagcgaggtatgtaggcggtgctacagagttcttgaagtggtggcctaactacggctacactagaagaacagtatttggtatctgcgctctgctgaagccagttaccttcggaaaaagagttggtagctcttgatccggcaaacaaaccaccgctggtagcggtggtttttttgtttgcaagcagcagattacgcgcagaaaaaaaggatctcaagaagatcctttgatcttttctacggggtctgacgctcagtggaacgaaaactcacgttaagggattttggtcatgagattatcaaaaaggatcttcacctagatccttttaaattaaaaatgaagttttaaatcaatctaaagtatatatgagtaaacttggtctgacagttagaaaaactcatcgagcatcaaatgaaactgcaatttattcatatcaggattatcaataccatatttttgaaaaagccgtttctgtaatgaaggagaaaactcaccgaggcagttccataggatggcaagatcctggtatcggtctgcgattccgactcgtccaacatcaatacaacctattaatttcccctcgtcaaaaataaggttatcaagtgagaaatcaccatgagtgacgactgaatccggtgagaatggcaaaagtttatgcatttctttccagacttgttcaacaggccagccattacgctcgtcatcaaaatcactcgcatcaaccaaaccgttattcattcgtgattgcgcctgagcgagacgaaatacgcgatcgctgttaaaaggacaattacaaacaggaatcgaatgcaaccggcgcaggaacactgccagcgcatcaacaatattttcacctgaatcaggatattcttctaatacctggaatgctgttttcccagggatcgcagtggtgagtaaccatgcatcatcaggagtacggataaaatgcttgatggtcggaagaggcataaattccgtcagccagtttagtctgaccatctcatctgtaacatcattggcaacgctacctttgccatgtttcagaaacaactctggcgcatcgggcttcccatacaatcgatagattgtcgcacctgattgcccgacattatcgcgagcccatttatacccatataaatcagcatccatgttggaatttaatcgcggcctagagcaagacgtttcccgttgaatatggctcatactcttcctttttcaatattattgaagcatttatcagggttattgtctcatgagcggatacatatttgaatgtatttagaaaaataaacaaataggggttccgcgcacatttccccgaaaagtgccacctgacgtctaagaaaccattattatcatgacattaacctataaaaataggcgtatcacgaggccctttcgtc

SEQ ID NO: 251 - DNA, 4339 bp, Artificial Sequence
  pLMTB8391
tcgcgcgtttcggtgatgacggtgaaaacctctgacacatgcagctcccggagacggtcacagcttgtctgtaagcggatgccgggagcagacaagcccgtcagggcgcgtcagcgggtgttggcgggtgtcggggctggcttaactatgcggcatcagagcagattgtactgagagtgcaccatatgcggtgtgaaataccgcacagatgcgtaaggagaaaataccgcatcaggcgccattcgccattcaggctgcgcaactgttgggaagggcgatcggtgcgggcctcttcgctattacgccagctggcgaaagggggatgtgctgcaaggcgattaagttgggtaacgccagggttttcccagtcacgacgttgtaaaacgacggccagtgaattgacgcgtattgggatatttaaatggcgtgtgcgcaccggcgtgtgccaacgcccaggtactgtgcgcacgttcgtatctccatacgctagctgaccgagacgcatgccctccgccaccctcagtggcgcgcaccttctctcgtttgagctctttatgctctcgtgaatggcacacaacatcccgtgactatcacgatgatccttctcaagccacaccgcttgccttttctacagctctgcgttctctggcccatcctcctcttgtttgctttccctctttgcacatccgtgtgcgcgtccttgttcttctcttctgcgcacactattctgcgcccgcgacccgcgcttcgactgctgtcgggtcatgccttgtgctgcgcgttcagctcttcattgcccctcggccttgtacatagcggctctccgtcatcgacgttttcctctctcttcagctctatacactccctcccttgtcaacacactacactgtgtctccccctttcatctctcctcccctgtcacaatgcgcctccgcgaacccctcctgagcggctccgcagcgatgcctggggcttcgctgcagcgcgcctgtcggctgctcgtagcggtctgcgcactccaccttggcgtgactctcgtctactatctggcgggacgagatctgtcgcgcctcccacagctcgtgggtgtgtcgacgccgctgcaaggaggctcaaattcggccgcggccatcggtcagagctccggcgagctgcgcacgggaggagcacgcccgccacctccgctgggtgcatcgtctcagccccgtccgggcggcgacagttcaccggttgtggactcgggtccaggacctgcatctaaccttacgtccgtgcccgtaccacacacgacggctctttcgcttccagcctgtcccgaagagtcccctctgcttgttggtccgatgttgatcgagttcaacatgcctgttgatctcgaattggtggcaaaacaaaacccaaacgtgaaaatgggaggccggtacgccccgcgagattgcgtgtcgcctcacaaggttgcgatcatcatcccctttcggaatcgccaggaacaccttaagtactggttgtactacctccaccccgttttgcagcgccagcagttggattatggcatctacgtcattaaccaggccggtgatacgatttttaaccgcgccaagctgctcaacgtgggttttcaggaggcgctcaaggactacgattacacgtgcttcgtcttttccgacgttgatttgattcctatgaacgaccacaatgcgtatcggtgtttcagccagccgcgccacatttcggtagccatggataagtttggattctccctgccttacgtacaatacttcggcggcgtgagcgcattgtcgaagcaacagttcctgacgatcaacggctttccaaacaattactggggttggggcggggaagacgacgacatcttcaatcgtctggtgtttcgtgggatgtctatttcccgcccgaacgcagtcgtcggtcgctgccgtatgatccgacattctcgtgataagaagaacgagcctaacccacagcgcttcgaccgaatcgctcatactaaggaaacgatgctctccgacgggctcaactctctcacataccaggtcctcgacgtgcagcgctatccactttacacgcagattacggtcgacatcggcaccccgtcgtgaatttaaatatcccaatggcgcgccgagcttggctcgagcatggtcatagctgtttcctgtgtgaaattgttatccgctcacaattccacacaacatacgagccggaagcataaagtgtaaagcctggggtgcctaatgagtgagctaactcacattaattgcgttgcgctcactgcccgctttccagtcgggaaacctgtcgtgccagctgcattaatgaatcggccaacgcgcggggagaggcggtttgcgtattgggcgctcttccgcttcctcgctcactgactcgctgcgctcggtcgttcggctgcggcgagcggtatcagctcactcaaaggcggtaatacggttatccacagaatcaggggataacgcaggaaagaacatgtgagcaaaaggccagcaaaaggccaggaaccgtaaaaaggccgcgttgctggcgtttttccataggctccgcccccctgacgagcatcacaaaaatcgacgctcaagtcagaggtggcgaaacccgacaggactataaagataccaggcgtttccccctggaagctccctcgtgcgctctcctgttccgaccctgccgcttaccggatacctgtccgcctttctcccttcgggaagcgtggcgctttctcatagctcacgctgtaggtatctcagttcggtgtaggtcgttcgctccaagctgggctgtgtgcacgaaccccccgttcagcccgaccgctgcgccttatccggtaactatcgtcttgagtccaacccggtaagacacgacttatcgccactggcagcagccactggtaacaggattagcagagcgaggtatgtaggcggtgctacagagttcttgaagtggtggcctaactacggctacactagaagaacagtatttggtatctgcgctctgctgaagccagttaccttcggaaaaagagttggtagctcttgatccggcaaacaaaccaccgctggtagcggtggtttttttgtttgcaagcagcagattacgcgcagaaaaaaaggatctcaagaagatcctttgatcttttctacggggtctgacgctcagtggaacgaaaactcacgttaagggattttggtcatgagattatcaaaaaggatcttcacctagatccttttaaattaaaaatgaagttttaaatcaatctaaagtatatatgagtaaacttggtctgacagttagaaaaactcatcgagcatcaaatgaaactgcaatttattcatatcaggattatcaataccatatttttgaaaaagccgtttctgtaatgaaggagaaaactcaccgaggcagttccataggatggcaagatcctggtatcggtctgcgattccgactcgtccaacatcaatacaacctattaatttcccctcgtcaaaaataaggttatcaagtgagaaatcaccatgagtgacgactgaatccggtgagaatggcaaaagtttatgcatttctttccagacttgttcaacaggccagccattacgctcgtcatcaaaatcactcgcatcaaccaaaccgttattcattcgtgattgcgcctgagcgagacgaaatacgcgatcgctgttaaaaggacaattacaaacaggaatcgaatgcaaccggcgcaggaacactgccagcgcatcaacaatattttcacctgaatcaggatattcttctaatacctggaatgctgttttcccagggatcgcagtggtgagtaaccatgcatcatcaggagtacggataaaatgcttgatggtcggaagaggcataaattccgtcagccagtttagtctgaccatctcatctgtaacatcattggcaacgctacctttgccatgtttcagaaacaactctggcgcatcgggcttcccatacaatcgatagattgtcgcacctgattgcccgacattatcgcgagcccatttatacccatataaatcagcatccatgttggaatttaatcgcggcctagagcaagacgtttcccgttgaatatggctcatactcttcctttttcaatattattgaagcatttatcagggttattgtctcatgagcggatacatatttgaatgtatttagaaaaataaacaaataggggttccgcgcacatttccccgaaaagtgccacctgacgtctaagaaaccattattatcatgacattaacctataaaaataggcgtatcacgaggccctttcgtc

SEQ ID NO: 252 - DNA, 3986 bp, Artificial Sequence
  pLMTB8447
atgtggtctcacccgcagttcgaaaaaggcggatcaggaggggacagtgtagaaaagggcgcggccacaagtgtcagtaatccgcgcggccgcccctcgcgcgggcgccccccaaagctccagcgcaattcgcggggcggtcaaggccgcggcgtggagaaacccccacacctggccgcactcattctggcgcggggtggctcgaaggggatcccgctgaagaacatcaaacatctggcgggcgtccctcttatcggctgggtgctgcgcgctgcactcgactcgggggcgttccagtccgtctgggtctcgactgaccatgatgagattgagaacgtggcgaagcagtttggagcacaggttcaccgccgcagcagcgaggtcagcaaggattccagtacgtcactcgacgccatcatcgagtttctcaactaccataacgaagtggatatcgttggaaacattcaagccacaagtccgtgtctgcatccgaccgaccttcaaaaggtggccgagatgatccgcgaggagggttacgacagcgtgttcagtgtcgtccgccgccaccaattccgttggtccgagatccaaaagggagttcgggaggtaaccgagcctctcaacctcaaccctgccaagcgcccgcggcggcaagactgggacggcgaactgtacgagaacggctccttctacttcgccaagcggcacctgattgaaatgggctatctccagggggggaagatggcatactacgagatgcgtgcggagcacagcgtcgacattgatgtggacattgattggccgatcgcagagcagcgcgtgcttcgttacggttactttgggaaggagaagcttaaggaaataaagctgctggtctgcaacattgacggttgcctgacgaatgggcacatttacgtgtcaggagaccagaaggagattatcagctatgacgtgaaggacgcgatcggcatttcgttgctgaagaagtcaggcatcgaggtgcgcctgatctccgagcgcgcgtgcagcaagcaaacgctgagtagtcttaagctggattgcaagatggaggtgtctgtgtcggacaagctcgctgttgtggacgaatggcggaaggaaatgggtctctgctggaaggaagtggcgtacctgggcaacgaagtttccgatgaggagtgtctgaagcgtgtgggactcagcggcgcacctgcggacgcgtgctccacagcccagaaagcagtgggctacatctgtaagtgcaacggtggacgaggcgcgatccgcgagtttgcggaacatatatgcctcctgatggaaaaggtcaacaacagttgccagaagtagatttaaatatcccaatggcgcgccgagcttggctcgagcatggtcatagctgtttcctgtgtgaaattgttatccgctcacaattccacacaacatacgagccggaagcataaagtgtaaagcctggggtgcctaatgagtgagctaactcacattaattgcgttgcgctcactgcccgctttccagtcgggaaacctgtcgtgccagctgcattaatgaatcggccaacgcgcggggagaggcggtttgcgtattgggcgctcttccgcttcctcgctcactgactcgctgcgctcggtcgttcggctgcggcgagcggtatcagctcactcaaaggcggtaatacggttatccacagaatcaggggataacgcaggaaagaacatgtgagcaaaaggccagcaaaaggccaggaaccgtaaaaaggccgcgttgctggcgtttttccataggctccgcccccctgacgagcatcacaaaaatcgacgctcaagtcagaggtggcgaaacccgacaggactataaagataccaggcgtttccccctggaagctccctcgtgcgctctcctgttccgaccctgccgcttaccggatacctgtccgcctttctcccttcgggaagcgtggcgctttctcatagctcacgctgtaggtatctcagttcggtgtaggtcgttcgctccaagctgggctgtgtgcacgaaccccccgttcagcccgaccgctgcgccttatccggtaactatcgtcttgagtccaacccggtaagacacgacttatcgccactggcagcagccactggtaacaggattagcagagcgaggtatgtaggcggtgctacagagttcttgaagtggtggcctaactacggctacactagaagaacagtatttggtatctgcgctctgctgaagccagttaccttcggaaaaagagttggtagctcttgatccggcaaacaaaccaccgctggtagcggtggtttttttgtttgcaagcagcagattacgcgcagaaaaaaaggatctcaagaagatcctttgatcttttctacggggtctgacgctcagtggaacgaaaactcacgttaagggattttggtcatgagattatcaaaaaggatcttcacctagatccttttaaattaaaaatgaagttttaaatcaatctaaagtatatatgagtaaacttggtctgacagttagaaaaactcatcgagcatcaaatgaaactgcaatttattcatatcaggattatcaataccatatttttgaaaaagccgtttctgtaatgaaggagaaaactcaccgaggcagttccataggatggcaagatcctggtatcggtctgcgattccgactcgtccaacatcaatacaacctattaatttcccctcgtcaaaaataaggttatcaagtgagaaatcaccatgagtgacgactgaatccggtgagaatggcaaaagtttatgcatttctttccagacttgttcaacaggccagccattacgctcgtcatcaaaatcactcgcatcaaccaaaccgttattcattcgtgattgcgcctgagcgagacgaaatacgcgatcgctgttaaaaggacaattacaaacaggaatcgaatgcaaccggcgcaggaacactgccagcgcatcaacaatattttcacctgaatcaggatattcttctaatacctggaatgctgttttcccagggatcgcagtggtgagtaaccatgcatcatcaggagtacggataaaatgcttgatggtcggaagaggcataaattccgtcagccagtttagtctgaccatctcatctgtaacatcattggcaacgctacctttgccatgtttcagaaacaactctggcgcatcgggcttcccatacaatcgatagattgtcgcacctgattgcccgacattatcgcgagcccatttatacccatataaatcagcatccatgttggaatttaatcgcggcctagagcaagacgtttcccgttgaatatggctcatactcttcctttttcaatattattgaagcatttatcagggttattgtctcatgagcggatacatatttgaatgtatttagaaaaataaacaaataggggttccgcgcacatttccccgaaaagtgccacctgacgtctaagaaaccattattatcatgacattaacctataaaaataggcgtatcacgaggccctttcgtctcgcgcgtttcggtgatgacggtgaaaacctctgacacatgcagctcccggagacggtcacagcttgtctgtaagcggatgccgggagcagacaagcccgtcagggcgcgtcagcgggtgttggcgggtgtcggggctggcttaactatgcggcatcagagcagattgtactgagagtgcaccatatgcggtgtgaaataccgcacagatgcgtaaggagaaaataccgcatcaggcgccattcgccattcaggctgcgcaactgttgggaagggcgatcggtgcgggcctcttcgctattacgccagctggcgaaagggggatgtgctgcaaggcgattaagttgggtaacgccagggttttcccagtcacgacgttgtaaaacgacggccagtgaattgacgcgtattgggatatttaaat

SEQ ID NO: 253 - DNA, 3984 bp, Artificial Sequence
  pLMTB8461
gacgtgcacgcagtcctgtccccacccccgacagcaggagtgcgggactgggtgctctaacaagcgcatggtacgagctatgtgctggtgtgtagccagcggggctgtcatgccatgtcgatctctccccgtgagcagccccccaaaaagacaacctgatttctccctttttccgatatttctccctttgtgctaaggggacccttcagcagctcccagcgccgcacatgcacacactggcgcgtgcttccgaggtcctcggtgcacatattttctattatctcacacacccggttgcagggcggctcaatgtcacggcgcgcgcacgcactgccttgagtacggaacggcgagcgatacgaccgagacggcgctgccagtagggtgtaggacgctgcgcatctcatgaatgtatgaagcatgcagccaaccacacaaacatatgggcgcacgagtcttccctcacagacagcgcggctggtgaggcggcagaaggtcggccgcggaagggcacacactacgtttcacgcgtacatgaccccgtccgctttccgcgctattttaggcgcacacccgttcaccagcctctccgatcctgcttccactcctcctccgcctccgccctccctctccccgtcatgacgccgcacgcaccgcgatcgcacacaagctctctctctctctcaacacaaccgaaccaacatccctcaccccctctcttaccacaaaatgaaaaagcctgaactcaccgcgacgtctgtcgagaagtttctgatcgaaaagttcgacagcgtctccgacctgatgcagctctcggagggcgaagaatctcgtgctttcagcttcgatgtaggagggcgtggatatgtcctgcgggtaaatagctgcgccgatggtttctacaaagatcgttatgtttatcggcactttgcatcggccgcgctcccgattccggaagtgcttgacattggggaattcagcgagagcctgacctattgcatctcccgccgtgcacagggtgtcacgttgcaagacctgcctgaaaccgaactgcccgctgttctgcagccggtcgcggaggcgatggatgcgatcgctgcggccgatcttagccagacgagcgggttcggcccattcggaccgcaaggaatcggtcaatacactacatggcgtgatttcatatgcgcgattgctgatccccatgtgtatcactggcaaactgtgatggacgacaccgtcagtgcgtccgtcgcgcaggctctcgatgagctgatgctttgggccgaggactgccccgaagtccggcacctcgtgcacgcggatttcggctccaacaatgtccatttaaatatcccaatggcgcgccgagcttggctcgagcatggtcatagctgtttcctgtgtgaaattgttatccgctcacaattccacacaacatacgagccggaagcataaagtgtaaagcctggggtgcctaatgagtgagctaactcacattaattgcgttgcgctcactgcccgctttccagtcgggaaacctgtcgtgccagctgcattaatgaatcggccaacgcgcggggagaggcggtttgcgtattgggcgctcttccgcttcctcgctcactgactcgctgcgctcggtcgttcggctgcggcgagcggtatcagctcactcaaaggcggtaatacggttatccacagaatcaggggataacgcaggaaagaacatgtgagcaaaaggccagcaaaaggccaggaaccgtaaaaaggccgcgttgctggcgtttttccataggctccgcccccctgacgagcatcacaaaaatcgacgctcaagtcagaggtggcgaaacccgacaggactataaagataccaggcgtttccccctggaagctccctcgtgcgctctcctgttccgaccctgccgcttaccggatacctgtccgcctttctcccttcgggaagcgtggcgctttctcatagctcacgctgtaggtatctcagttcggtgtaggtcgttcgctccaagctgggctgtgtgcacgaaccccccgttcagcccgaccgctgcgccttatccggtaactatcgtcttgagtccaacccggtaagacacgacttatcgccactggcagcagccactggtaacaggattagcagagcgaggtatgtaggcggtgctacagagttcttgaagtggtggcctaactacggctacactagaagaacagtatttggtatctgcgctctgctgaagccagttaccttcggaaaaagagttggtagctcttgatccggcaaacaaaccaccgctggtagcggtggtttttttgtttgcaagcagcagattacgcgcagaaaaaaaggatctcaagaagatcctttgatcttttctacggggtctgacgctcagtggaacgaaaactcacgttaagggattttggtcatgagattatcaaaaaggatcttcacctagatccttttaaattaaaaatgaagttttaaatcaatctaaagtatatatgagtaaacttggtctgacagttagaaaaactcatcgagcatcaaatgaaactgcaatttattcatatcaggattatcaataccatatttttgaaaaagccgtttctgtaatgaaggagaaaactcaccgaggcagttccataggatggcaagatcctggtatcggtctgcgattccgactcgtccaacatcaatacaacctattaatttcccctcgtcaaaaataaggttatcaagtgagaaatcaccatgagtgacgactgaatccggtgagaatggcaaaagtttatgcatttctttccagacttgttcaacaggccagccattacgctcgtcatcaaaatcactcgcatcaaccaaaccgttattcattcgtgattgcgcctgagcgagacgaaatacgcgatcgctgttaaaaggacaattacaaacaggaatcgaatgcaaccggcgcaggaacactgccagcgcatcaacaatattttcacctgaatcaggatattcttctaatacctggaatgctgttttcccagggatcgcagtggtgagtaaccatgcatcatcaggagtacggataaaatgcttgatggtcggaagaggcataaattccgtcagccagtttagtctgaccatctcatctgtaacatcattggcaacgctacctttgccatgtttcagaaacaactctggcgcatcgggcttcccatacaatcgatagattgtcgcacctgattgcccgacattatcgcgagcccatttatacccatataaatcagcatccatgttggaatttaatcgcggcctagagcaagacgtttcccgttgaatatggctcatactcttcctttttcaatattattgaagcatttatcagggttattgtctcatgagcggatacatatttgaatgtatttagaaaaataaacaaataggggttccgcgcacatttccccgaaaagtgccacctgacgtctaagaaaccattattatcatgacattaacctataaaaataggcgtatcacgaggccctttcgtctcgcgcgtttcggtgatgacggtgaaaacctctgacacatgcagctcccggagacggtcacagcttgtctgtaagcggatgccgggagcagacaagcccgtcagggcgcgtcagcgggtgttggcgggtgtcggggctggcttaactatgcggcatcagagcagattgtactgagagtgcaccatatgcggtgtgaaataccgcacagatgcgtaaggagaaaataccgcatcaggcgccattcgccattcaggctgcgcaactgttgggaagggcgatcggtgcgggcctcttcgctattacgccagctggcgaaagggggatgtgctgcaaggcgattaagttgggtaacgccagggttttcccagtcacgacgttgtaaaacgacggccagtgaattgacgcgtattgggatatttaaat

SEQ ID NO: 254 - DNA, 4019 bp, Artificial Sequence
  pLMTB8488
cccttcttttcgagaagaatatggtcaagcacctcaacgagggtacggatgaggacatttacctgtttgggaaggcaacactctccggatttcgtaacaaccgttgcgcaggagcatacccctacgacgtgccagattacgcctacccttacgatgtaccggactacgcttacccgtacgacgtgccggactacgcgtaggctgcccctcctctccgcgtgcagtggcgatgcgcttgcgcttttgtcgttgacgtgccacagccggcgcgtgtgcagcgcgtccccccggtatgctctgcctgttctccacccacacccccgcctctaccccgtgcgtgcgtgcgtgcgtgcggtcgccctccacctgtggcgcggcagctgaacggaaggcaaacaacagcgaagagaaaagtaacaagtacagtcaaatgaagaaaaaaaaagaaagccaaatgctggcgcggtgtggtgggactggtgtgcgtgctctgtctgtgctgatgggcgccagggagactgctcccctgtccccccgccccgccggggcagctcccattatctttaggcagttcccagtggaccggcgacggtaagccgccatctcttttcctgtgacctcagttataagcctgtaagcctgatgtacgcataaaccaaactcccgcgcacaagcacacagccgactttcgtagtgtcatctgcagaggtgtcggtgactgtgtgcgtgcgcgctgctgcggcgtcggttccgaggcgcgtgcggctgccttctccccgcaacctgctgctgcggtagggcgcttgatggcgccgtgccgtgagcccgcggttttcgcgctgtcgcgcgcgtggaggaccgctcccccttcttcgcttgcctccgcgtggctgcctcctgtctctgtgcctcacttgcgcctccgcctccctctccttcgtctttgcctctctcccgccccgcggcctgccccggcgttgcgtgcgcaccactgacgtgtgcgcgtgctgctcgccctctctctctgtgcgtgtgcctgtgcgtggtgcgaccccgccgcgcgccgcacccccattctccctattcctcccacacttttctgtacccctgctcctcatgccccgacgacgtgtgcgccgcgtgcagtaagcgcaatcgagtttcaacagctaacaaaatgtggtctcacccgcagttcgaaaaaggcggatcaggaggggacagtgtagaaaagggcgcggccacaagtgtcagtaatccgcgcggccgcccctcgcgcgggcgccccccaaagctccagcgcaattcgcggggcggtcaaggccgcggcgtggagaaacccccacacctggccgcactcattctggcgcggggtggatttaaatatcccaatggcgcgccgagcttggctcgagcatggtcatagctgtttcctgtgtgaaattgttatccgctcacaattccacacaacatacgagccggaagcataaagtgtaaagcctggggtgcctaatgagtgagctaactcacattaattgcgttgcgctcactgcccgctttccagtcgggaaacctgtcgtgccagctgcattaatgaatcggccaacgcgcggggagaggcggtttgcgtattgggcgctcttccgcttcctcgctcactgactcgctgcgctcggtcgttcggctgcggcgagcggtatcagctcactcaaaggcggtaatacggttatccacagaatcaggggataacgcaggaaagaacatgtgagcaaaaggccagcaaaaggccaggaaccgtaaaaaggccgcgttgctggcgtttttccataggctccgcccccctgacgagcatcacaaaaatcgacgctcaagtcagaggtggcgaaacccgacaggactataaagataccaggcgtttccccctggaagctccctcgtgcgctctcctgttccgaccctgccgcttaccggatacctgtccgcctttctcccttcgggaagcgtggcgctttctcatagctcacgctgtaggtatctcagttcggtgtaggtcgttcgctccaagctgggctgtgtgcacgaaccccccgttcagcccgaccgctgcgccttatccggtaactatcgtcttgagtccaacccggtaagacacgacttatcgccactggcagcagccactggtaacaggattagcagagcgaggtatgtaggcggtgctacagagttcttgaagtggtggcctaactacggctacactagaagaacagtatttggtatctgcgctctgctgaagccagttaccttcggaaaaagagttggtagctcttgatccggcaaacaaaccaccgctggtagcggtggtttttttgtttgcaagcagcagattacgcgcagaaaaaaaggatctcaagaagatcctttgatcttttctacggggtctgacgctcagtggaacgaaaactcacgttaagggattttggtcatgagattatcaaaaaggatcttcacctagatccttttaaattaaaaatgaagttttaaatcaatctaaagtatatatgagtaaacttggtctgacagttagaaaaactcatcgagcatcaaatgaaactgcaatttattcatatcaggattatcaataccatatttttgaaaaagccgtttctgtaatgaaggagaaaactcaccgaggcagttccataggatggcaagatcctggtatcggtctgcgattccgactcgtccaacatcaatacaacctattaatttcccctcgtcaaaaataaggttatcaagtgagaaatcaccatgagtgacgactgaatccggtgagaatggcaaaagtttatgcatttctttccagacttgttcaacaggccagccattacgctcgtcatcaaaatcactcgcatcaaccaaaccgttattcattcgtgattgcgcctgagcgagacgaaatacgcgatcgctgttaaaaggacaattacaaacaggaatcgaatgcaaccggcgcaggaacactgccagcgcatcaacaatattttcacctgaatcaggatattcttctaatacctggaatgctgttttcccagggatcgcagtggtgagtaaccatgcatcatcaggagtacggataaaatgcttgatggtcggaagaggcataaattccgtcagccagtttagtctgaccatctcatctgtaacatcattggcaacgctacctttgccatgtttcagaaacaactctggcgcatcgggcttcccatacaatcgatagattgtcgcacctgattgcccgacattatcgcgagcccatttatacccatataaatcagcatccatgttggaatttaatcgcggcctagagcaagacgtttcccgttgaatatggctcatactcttcctttttcaatattattgaagcatttatcagggttattgtctcatgagcggatacatatttgaatgtatttagaaaaataaacaaataggggttccgcgcacatttccccgaaaagtgccacctgacgtctaagaaaccattattatcatgacattaacctataaaaataggcgtatcacgaggccctttcgtctcgcgcgtttcggtgatgacggtgaaaacctctgacacatgcagctcccggagacggtcacagcttgtctgtaagcggatgccgggagcagacaagcccgtcagggcgcgtcagcgggtgttggcgggtgtcggggctggcttaactatgcggcatcagagcagattgtactgagagtgcaccatatgcggtgtgaaataccgcacagatgcgtaaggagaaaataccgcatcaggcgccattcgccattcaggctgcgcaactgttgggaagggcgatcggtgcgggcctcttcgctattacgccagctggcgaaagggggatgtgctgcaaggcgattaagttgggtaacgccagggttttcccagtcacgacgttgtaaaacgacggccagtgaattgacgcgtattgggatatttaaat

SEQ ID NO: 255 - DNA, 3732 bp, Artificial Sequence
  pLMTB8490
cgtacctgggcaacgaagtttccgatgaggagtgtctgaagcgtgtgggactcagcggcgcacctgcggacgcgtgctccacagcccagaaagcagtgggctacatctgtaagtgcaacggtggacgaggcgcgatccgcgagtttgcggaacatatatgcctcctgatggaaaaggtcaacaacagttgccagaagtagccagcgcggccttcgcgcttcccatcctctctgttcgtctttctttcaccccttccccccagtgactttgcttggaaaaccggagcgtcgctgccgtcctcatgtgtgatgtttttctcggctcatcccattccgcgtgcgtgcgcgtgtggcgcctcccctcagcccatacgcgagctggttcctgggcagcggtctacgcgggcactccacacacgcacacgcgcacccccgccccaccgccgcgtgaaacctgtgtatcacccatgtgcgcacgccctctctctctttccgttcgtcctcttcttttgctgcgggggtcgtgctgtcgccgcgcatacagccggcagcgcacaccgccctcccttcatgtgtacagcccactcgcagtcctatctgcccctcccccccccacacgcacaagcacgcataccctgaccgccaacgtcacccagctgcgctgcagacgccgttgcgtcacgcccgccattcgcaccagccgccccccccccgcggtagccccgccggccgctcttccagcggcgcaccgcccctgcatctgcctcctattgcacgacctctctcccctgccactcctcgtcctccctccctccctccctccccctctgcgccgcaccgctgcacgcagcagcccatttgccctcgcaccgcaccccctccagcccaccaatggccgcgccacgcgataacgtcaccctgcttttcaagttgtactgcctggcggtgatgactctgatggcagcggtgtacaccattgccctgcgctatacgcgtacctcggacaaggagctgtatttcagcacaacggccgtgtgcattacagaggtgattaagcttttgctgtcagtcgggatcttggcaaaggagacatttaaatatcccaatggcgcgccgagcttggctcgagcatggtcatagctgtttcctgtgtgaaattgttatccgctcacaattccacacaacatacgagccggaagcataaagtgtaaagcctggggtgcctaatgagtgagctaactcacattaattgcgttgcgctcactgcccgctttccagtcgggaaacctgtcgtgccagctgcattaatgaatcggccaacgcgcggggagaggcggtttgcgtattgggcgctcttccgcttcctcgctcactgactcgctgcgctcggtcgttcggctgcggcgagcggtatcagctcactcaaaggcggtaatacggttatccacagaatcaggggataacgcaggaaagaacatgtgagcaaaaggccagcaaaaggccaggaaccgtaaaaaggccgcgttgctggcgtttttccataggctccgcccccctgacgagcatcacaaaaatcgacgctcaagtcagaggtggcgaaacccgacaggactataaagataccaggcgtttccccctggaagctccctcgtgcgctctcctgttccgaccctgccgcttaccggatacctgtccgcctttctcccttcgggaagcgtggcgctttctcatagctcacgctgtaggtatctcagttcggtgtaggtcgttcgctccaagctgggctgtgtgcacgaaccccccgttcagcccgaccgctgcgccttatccggtaactatcgtcttgagtccaacccggtaagacacgacttatcgccactggcagcagccactggtaacaggattagcagagcgaggtatgtaggcggtgctacagagttcttgaagtggtggcctaactacggctacactagaagaacagtatttggtatctgcgctctgctgaagccagttaccttcggaaaaagagttggtagctcttgatccggcaaacaaaccaccgctggtagcggtggtttttttgtttgcaagcagcagattacgcgcagaaaaaaaggatctcaagaagatcctttgatcttttctacggggtctgacgctcagtggaacgaaaactcacgttaagggattttggtcatgagattatcaaaaaggatcttcacctagatccttttaaattaaaaatgaagttttaaatcaatctaaagtatatatgagtaaacttggtctgacagttagaaaaactcatcgagcatcaaatgaaactgcaatttattcatatcaggattatcaataccatatttttgaaaaagccgtttctgtaatgaaggagaaaactcaccgaggcagttccataggatggcaagatcctggtatcggtctgcgattccgactcgtccaacatcaatacaacctattaatttcccctcgtcaaaaataaggttatcaagtgagaaatcaccatgagtgacgactgaatccggtgagaatggcaaaagtttatgcatttctttccagacttgttcaacaggccagccattacgctcgtcatcaaaatcactcgcatcaaccaaaccgttattcattcgtgattgcgcctgagcgagacgaaatacgcgatcgctgttaaaaggacaattacaaacaggaatcgaatgcaaccggcgcaggaacactgccagcgcatcaacaatattttcacctgaatcaggatattcttctaatacctggaatgctgttttcccagggatcgcagtggtgagtaaccatgcatcatcaggagtacggataaaatgcttgatggtcggaagaggcataaattccgtcagccagtttagtctgaccatctcatctgtaacatcattggcaacgctacctttgccatgtttcagaaacaactctggcgcatcgggcttcccatacaatcgatagattgtcgcacctgattgcccgacattatcgcgagcccatttatacccatataaatcagcatccatgttggaatttaatcgcggcctagagcaagacgtttcccgttgaatatggctcatactcttcctttttcaatattattgaagcatttatcagggttattgtctcatgagcggatacatatttgaatgtatttagaaaaataaacaaataggggttccgcgcacatttccccgaaaagtgccacctgacgtctaagaaaccattattatcatgacattaacctataaaaataggcgtatcacgaggccctttcgtctcgcgcgtttcggtgatgacggtgaaaacctctgacacatgcagctcccggagacggtcacagcttgtctgtaagcggatgccgggagcagacaagcccgtcagggcgcgtcagcgggtgttggcgggtgtcggggctggcttaactatgcggcatcagagcagattgtactgagagtgcaccatatgcggtgtgaaataccgcacagatgcgtaaggagaaaataccgcatcaggcgccattcgccattcaggctgcgcaactgttgggaagggcgatcggtgcgggcctcttcgctattacgccagctggcgaaagggggatgtgctgcaaggcgattaagttgggtaacgccagggttttcccagtcacgacgttgtaaaacgacggccagtgaattgacgcgtattgggatatttaaat

SEQ ID NO: 256 - DNA, 4174 bp, Artificial Sequence
  pLMTB8564
aacacttgatcatcaatgcgcaatgtgcgcgtgttgtgtgtgtgtgtgcgagcgcacacacacatgcacacgactcacgttgtcacacaattgagagctctctcttctccttcccctctctctcctctctcctctctccagagctctctcttctccttcccctctctctcctctctcctctctccagagctcgagccaccatgcgcctgaatgttaagaaggcgcttatatttgttggatgcgtcgtgttcctctgggtccttctgagctacgcgagcgtcattgaagtgcctcgtgcagtcccccagaaagacccggccgtcgaaatcgaaaagaagatcatcaagcttcaaaagcaggtcgatgcacaaatggcggagtccaagagcttgctcgccaaggtgaagaaactgaagaagatcagtgagggagagaacgttggcggcgaggaggactcgctgaaggacagtgaggttatgcagcacctgtctcagccgatcctccccgttctggtgattgcctgcgaccgcgtcactgtgcagcgttgtttggacaacctggtgaagttccgcccctcgaaggaaacgttccccatcattgtttcgcaagattgtggccacaacgcgacctatgaagtcattacgtcatacacggcctccgacccgactatctctgtggtgcgtcagcctgatttgagcgaaatcgtcctcccccgcgtgaaggtgaagttccgcggctattacaagattgctcggcactacaaatttgcccttaaccacgtttttgagacccttggccacgaggcggtgatcatcgtggaagacgacctggatatcagtccagatttctttgagtacttcctggggacgtacccgctgcttttgaaagacccgtccttgtggtgcatctcggcgtggaacgacaacggtaagatggaggtcatcgacatgtcgcgcccggacctgctgcaccgcaccgacttctttccgggccttggctgggtcctgcgccgcgaaatgtggcgtaagcttgctccaaaatggcccaccgcgttttttgacgactggctgcgaaacccggttaacatcgacggcaaggcctgcatccgcccagagatatctcgtacctatagtttcgggaaggtgggtgtgtctaagggactgttcttcgatcttcacctccgcaacattcagctcaatatggaatacgtcgaatttacgaaactgaacctcacatacctgcttaaggaacactacgacgatgccctcgtctccaccgtttacaatctgccggagatgagtgcatccgaggtggttgcaggcagcgatctcagcgcagacccggtgcgtgttatgtactccaatgccaagacatatcagcgcgccgcgaaaaagctcggcctgatggacgacttccgctccggggtaccgcgcacggcctaccgcggcatcgtgacgtgtttcattcggggccgacgagtataccttgccccgtcgtttgagtggaacaagtacgacccgacctggggatagatttaaatatcccaatggcgcgccgagcttggctcgagcatggtcatagctgtttcctgtgtgaaattgttatccgctcacaattccacacaacatacgagccggaagcataaagtgtaaagcctggggtgcctaatgagtgagctaactcacattaattgcgttgcgctcactgcccgctttccagtcgggaaacctgtcgtgccagctgcattaatgaatcggccaacgcgcggggagaggcggtttgcgtattgggcgctcttccgcttcctcgctcactgactcgctgcgctcggtcgttcggctgcggcgagcggtatcagctcactcaaaggcggtaatacggttatccacagaatcaggggataacgcaggaaagaacatgtgagcaaaaggccagcaaaaggccaggaaccgtaaaaaggccgcgttgctggcgtttttccataggctccgcccccctgacgagcatcacaaaaatcgacgctcaagtcagaggtggcgaaacccgacaggactataaagataccaggcgtttccccctggaagctccctcgtgcgctctcctgttccgaccctgccgcttaccggatacctgtccgcctttctcccttcgggaagcgtggcgctttctcatagctcacgctgtaggtatctcagttcggtgtaggtcgttcgctccaagctgggctgtgtgcacgaaccccccgttcagcccgaccgctgcgccttatccggtaactatcgtcttgagtccaacccggtaagacacgacttatcgccactggcagcagccactggtaacaggattagcagagcgaggtatgtaggcggtgctacagagttcttgaagtggtggcctaactacggctacactagaagaacagtatttggtatctgcgctctgctgaagccagttaccttcggaaaaagagttggtagctcttgatccggcaaacaaaccaccgctggtagcggtggtttttttgtttgcaagcagcagattacgcgcagaaaaaaaggatctcaagaagatcctttgatcttttctacggggtctgacgctcagtggaacgaaaactcacgttaagggattttggtcatgagattatcaaaaaggatcttcacctagatccttttaaattaaaaatgaagttttaaatcaatctaaagtatatatgagtaaacttggtctgacagttagaaaaactcatcgagcatcaaatgaaactgcaatttattcatatcaggattatcaataccatatttttgaaaaagccgtttctgtaatgaaggagaaaactcaccgaggcagttccataggatggcaagatcctggtatcggtctgcgattccgactcgtccaacatcaatacaacctattaatttcccctcgtcaaaaataaggttatcaagtgagaaatcaccatgagtgacgactgaatccggtgagaatggcaaaagtttatgcatttctttccagacttgttcaacaggccagccattacgctcgtcatcaaaatcactcgcatcaaccaaaccgttattcattcgtgattgcgcctgagcgagacgaaatacgcgatcgctgttaaaaggacaattacaaacaggaatcgaatgcaaccggcgcaggaacactgccagcgcatcaacaatattttcacctgaatcaggatattcttctaatacctggaatgctgttttcccagggatcgcagtggtgagtaaccatgcatcatcaggagtacggataaaatgcttgatggtcggaagaggcataaattccgtcagccagtttagtctgaccatctcatctgtaacatcattggcaacgctacctttgccatgtttcagaaacaactctggcgcatcgggcttcccatacaatcgatagattgtcgcacctgattgcccgacattatcgcgagcccatttatacccatataaatcagcatccatgttggaatttaatcgcggcctagagcaagacgtttcccgttgaatatggctcatactcttcctttttcaatattattgaagcatttatcagggttattgtctcatgagcggatacatatttgaatgtatttagaaaaataaacaaataggggttccgcgcacatttccccgaaaagtgccacctgacgtctaagaaaccattattatcatgacattaacctataaaaataggcgtatcacgaggccctttcgtctcgcgcgtttcggtgatgacggtgaaaacctctgacacatgcagctcccggagacggtcacagcttgtctgtaagcggatgccgggagcagacaagcccgtcagggcgcgtcagcgggtgttggcgggtgtcggggctggcttaactatgcggcatcagagcagattgtactgagagtgcaccatatgcggtgtgaaataccgcacagatgcgtaaggagaaaataccgcatcaggcgccattcgccattcaggctgcgcaactgttgggaagggcgatcggtgcgggcctcttcgctattacgccagctggcgaaagggggatgtgctgcaaggcgattaagttgggtaacgccagggttttcccagtcacgacgttgtaaaacgacggccagtgaattgacgcgtattgggatatttaaat

SEQ ID NO: 257 - DNA, 3962 bp, Artificial Sequence
  pLMTB8567
gcgcagacccggtgcgtgttatgtactccaatgccaagacatatcagcgcgccgcgaaaaagctcggcctgatggacgacttccgctccggggtaccgcgcacggcctaccgcggcatcgtgacgtgtttcattcggggccgacgagtataccttgccccgtcgtttgagtggaacaagtacgacccgacctggggatagtgccccgccgccgttgccgccacaccgccgtggccaataccaaagcgtgcatatttcgggcgcgtctgcatttttagtcccccttcttaggccttgtattgttcacttcatcttcccttctgtaggacgtctctctgttccatttcttttcttgtatgcgccccctcactaccgcctcccacgctctctctctctcgctctgtgtgtatgtgtgtgtgtgtgtgtgcacactttcgcgtcttcgacttgtccctttgtttttctcactctctctgccccctccccacctcaccgcctgtctatgcgcttccctccctgttgttctgtatgcgtaggtgtatacgtggtacacctcgagtgccacggcgtggcgcacatagcagcgttttcgttttttcgcttggtagaagatgcgcaaacggcgttcacgaccactgaaacagcgcgacatcggcgcgcacgcagtcccctttgccaatagcgaaatccggcacccgcacgtcagttctggctctctttcctcctcttcccatgacccgatggtggagctgcaaccagcttctcttttcgccttctgggaggcgggggtcatgcctactccctcagtcttcatgctttatccttcattgcctacccctttgtttgctgccgtctacctcactttcttccgacacacacacacacacacatacacacacacatacacacacacatacacacacacatacacgtgccgttcatctcttcttgcacctcacaatctgcgccttcttctttcagctgttcactgaactagaagcatctggcgaataccctcccccctcaacatacacaccgtaccacccccttctctccccctccacctccaaaaaaaaaatatatatttctcctctgtgccttcgcccatctcatcatttatcatggtgcggaagaaagggagcctgatcctttgcggcgcgttcctctttgtggcatggaatgccttgctgctgttgttcctttggggccgccccccgatcgggcgcctcggtgagggcgggggcgccgaaccgggcgccggagaagagtggggcgctggaaaatcaaaggtgggcggcgccaatggtctggcaggggaagtatttaaatatcccaatggcgcgccgagcttggctcgagcatggtcatagctgtttcctgtgtgaaattgttatccgctcacaattccacacaacatacgagccggaagcataaagtgtaaagcctggggtgcctaatgagtgagctaactcacattaattgcgttgcgctcactgcccgctttccagtcgggaaacctgtcgtgccagctgcattaatgaatcggccaacgcgcggggagaggcggtttgcgtattgggcgctcttccgcttcctcgctcactgactcgctgcgctcggtcgttcggctgcggcgagcggtatcagctcactcaaaggcggtaatacggttatccacagaatcaggggataacgcaggaaagaacatgtgagcaaaaggccagcaaaaggccaggaaccgtaaaaaggccgcgttgctggcgtttttccataggctccgcccccctgacgagcatcacaaaaatcgacgctcaagtcagaggtggcgaaacccgacaggactataaagataccaggcgtttccccctggaagctccctcgtgcgctctcctgttccgaccctgccgcttaccggatacctgtccgcctttctcccttcgggaagcgtggcgctttctcatagctcacgctgtaggtatctcagttcggtgtaggtcgttcgctccaagctgggctgtgtgcacgaaccccccgttcagcccgaccgctgcgccttatccggtaactatcgtcttgagtccaacccggtaagacacgacttatcgccactggcagcagccactggtaacaggattagcagagcgaggtatgtaggcggtgctacagagttcttgaagtggtggcctaactacggctacactagaagaacagtatttggtatctgcgctctgctgaagccagttaccttcggaaaaagagttggtagctcttgatccggcaaacaaaccaccgctggtagcggtggtttttttgtttgcaagcagcagattacgcgcagaaaaaaaggatctcaagaagatcctttgatcttttctacggggtctgacgctcagtggaacgaaaactcacgttaagggattttggtcatgagattatcaaaaaggatcttcacctagatccttttaaattaaaaatgaagttttaaatcaatctaaagtatatatgagtaaacttggtctgacagttagaaaaactcatcgagcatcaaatgaaactgcaatttattcatatcaggattatcaataccatatttttgaaaaagccgtttctgtaatgaaggagaaaactcaccgaggcagttccataggatggcaagatcctggtatcggtctgcgattccgactcgtccaacatcaatacaacctattaatttcccctcgtcaaaaataaggttatcaagtgagaaatcaccatgagtgacgactgaatccggtgagaatggcaaaagtttatgcatttctttccagacttgttcaacaggccagccattacgctcgtcatcaaaatcactcgcatcaaccaaaccgttattcattcgtgattgcgcctgagcgagacgaaatacgcgatcgctgttaaaaggacaattacaaacaggaatcgaatgcaaccggcgcaggaacactgccagcgcatcaacaatattttcacctgaatcaggatattcttctaatacctggaatgctgttttcccagggatcgcagtggtgagtaaccatgcatcatcaggagtacggataaaatgcttgatggtcggaagaggcataaattccgtcagccagtttagtctgaccatctcatctgtaacatcattggcaacgctacctttgccatgtttcagaaacaactctggcgcatcgggcttcccatacaatcgatagattgtcgcacctgattgcccgacattatcgcgagcccatttatacccatataaatcagcatccatgttggaatttaatcgcggcctagagcaagacgtttcccgttgaatatggctcatactcttcctttttcaatattattgaagcatttatcagggttattgtctcatgagcggatacatatttgaatgtatttagaaaaataaacaaataggggttccgcgcacatttccccgaaaagtgccacctgacgtctaagaaaccattattatcatgacattaacctataaaaataggcgtatcacgaggccctttcgtctcgcgcgtttcggtgatgacggtgaaaacctctgacacatgcagctcccggagacggtcacagcttgtctgtaagcggatgccgggagcagacaagcccgtcagggcgcgtcagcgggtgttggcgggtgtcggggctggcttaactatgcggcatcagagcagattgtactgagagtgcaccatatgcggtgtgaaataccgcacagatgcgtaaggagaaaataccgcatcaggcgccattcgccattcaggctgcgcaactgttgggaagggcgatcggtgcgggcctcttcgctattacgccagctggcgaaagggggatgtgctgcaaggcgattaagttgggtaacgccagggttttcccagtcacgacgttgtaaaacgacggccagtgaattgacgcgtattgggatatttaaat

SEQ ID NO: 258 - DNA, 4217 bp, Artificial Sequence
  pLMTB8568
atggtgcggaagaaagggagcctgatcctttgcggcgcgttcctctttgtggcatggaatgccttgctgctgttgttcctttggggccgccccccgatcgggcgcctcggtgagggcgggggcgccgaaccgggcgccggagaagagtggggcgctggaaaatcaaaggtgggcggcgccaatggtctggcaggggaagtcatccggctggcggaagaagtggagagtgaactcgaaacgcagaagaagctgctgaagcagattcagtcgcatcgcgagttgtgggagcagcgcaaagagctggagaagcgcgagagcgaggacacaaaagacgaaaagattgacgttgagccaaaaaagccccgtcaaatccccgcggtacacttgtcccacaaggtcgtggaggatgcccagacagtgacgaagaagatgcagacgttgatggtaaccccgccccaacttgtcatgaaggaacaggagacggaccagaagaataagcaaatgatggaggaccagttgggcttgaccaccccaagtccgcaaataatcattccgatcttggtgatcgcgtgtgaccgcgtgactgtcaagcgaagcctggatcgcctcatccagtaccgcccaagcgctgagctctacccgatcatcgtgtcccaggactgcggtcacgcagacaccgctcgcgtgatcggcagttatggctcacagatcacacacatctcccagccggacctcgccgatatccccgttcgaccggatcaccgcaagttccaggggtattacaaaattgcacgccactatcgctgggcactcaaccaggtgtttaatgtgtttgcgtacagtaccgtggtgatcgtcgaggacgaccttgaggtggccccggatttcttcgagtactttcgcgcgctgtaccccatcctgcgttcagaccccacactctggtgtatctcagcgtggaacgataacggccgggacggtctggtggacccgggtaaagcggagcttttgtaccgtacggatttcttccctggcttgggctggatgctgctcaaggaggtgtgggcggagcttgagcccaagtggccaaaggctttctgggacgactggatgcgccacccagagcaacgcaaaaaccgcagttgcatccgcccggagatcagccgcacgatcacatttggccgtaagggtgtatcgctcggtcagttctttgatcagtacttgcgctacattaaactcaacacagagttcgtccctttcacaaaacatgacctgagttacctggtccgcgagaagtacgacgtgtcgttcgagaaagacgtctactctgcccctcttgtgaaggtggaggagctccagcacggtgggagtctgaagggtagcgggcctttccgcgtccagtactcctctcgtgattcgttcaaggtgcttgcacggaacctgggggtcatggacgacctgaaatcaggcgttccacgcgccggataccgcggggtcgtgagttttatctcgcgaggccggcgcatttacctggcacccccggagggctggacgaagtacgacgttagctggtcttgaatttaaatatcccaatggcgcgccgagcttggctcgagcatggtcatagctgtttcctgtgtgaaattgttatccgctcacaattccacacaacatacgagccggaagcataaagtgtaaagcctggggtgcctaatgagtgagctaactcacattaattgcgttgcgctcactgcccgctttccagtcgggaaacctgtcgtgccagctgcattaatgaatcggccaacgcgcggggagaggcggtttgcgtattgggcgctcttccgcttcctcgctcactgactcgctgcgctcggtcgttcggctgcggcgagcggtatcagctcactcaaaggcggtaatacggttatccacagaatcaggggataacgcaggaaagaacatgtgagcaaaaggccagcaaaaggccaggaaccgtaaaaaggccgcgttgctggcgtttttccataggctccgcccccctgacgagcatcacaaaaatcgacgctcaagtcagaggtggcgaaacccgacaggactataaagataccaggcgtttccccctggaagctccctcgtgcgctctcctgttccgaccctgccgcttaccggatacctgtccgcctttctcccttcgggaagcgtggcgctttctcatagctcacgctgtaggtatctcagttcggtgtaggtcgttcgctccaagctgggctgtgtgcacgaaccccccgttcagcccgaccgctgcgccttatccggtaactatcgtcttgagtccaacccggtaagacacgacttatcgccactggcagcagccactggtaacaggattagcagagcgaggtatgtaggcggtgctacagagttcttgaagtggtggcctaactacggctacactagaagaacagtatttggtatctgcgctctgctgaagccagttaccttcggaaaaagagttggtagctcttgatccggcaaacaaaccaccgctggtagcggtggtttttttgtttgcaagcagcagattacgcgcagaaaaaaaggatctcaagaagatcctttgatcttttctacggggtctgacgctcagtggaacgaaaactcacgttaagggattttggtcatgagattatcaaaaaggatcttcacctagatccttttaaattaaaaatgaagttttaaatcaatctaaagtatatatgagtaaacttggtctgacagttagaaaaactcatcgagcatcaaatgaaactgcaatttattcatatcaggattatcaataccatatttttgaaaaagccgtttctgtaatgaaggagaaaactcaccgaggcagttccataggatggcaagatcctggtatcggtctgcgattccgactcgtccaacatcaatacaacctattaatttcccctcgtcaaaaataaggttatcaagtgagaaatcaccatgagtgacgactgaatccggtgagaatggcaaaagtttatgcatttctttccagacttgttcaacaggccagccattacgctcgtcatcaaaatcactcgcatcaaccaaaccgttattcattcgtgattgcgcctgagcgagacgaaatacgcgatcgctgttaaaaggacaattacaaacaggaatcgaatgcaaccggcgcaggaacactgccagcgcatcaacaatattttcacctgaatcaggatattcttctaatacctggaatgctgttttcccagggatcgcagtggtgagtaaccatgcatcatcaggagtacggataaaatgcttgatggtcggaagaggcataaattccgtcagccagtttagtctgaccatctcatctgtaacatcattggcaacgctacctttgccatgtttcagaaacaactctggcgcatcgggcttcccatacaatcgatagattgtcgcacctgattgcccgacattatcgcgagcccatttatacccatataaatcagcatccatgttggaatttaatcgcggcctagagcaagacgtttcccgttgaatatggctcatactcttcctttttcaatattattgaagcatttatcagggttattgtctcatgagcggatacatatttgaatgtatttagaaaaataaacaaataggggttccgcgcacatttccccgaaaagtgccacctgacgtctaagaaaccattattatcatgacattaacctataaaaataggcgtatcacgaggccctttcgtctcgcgcgtttcggtgatgacggtgaaaacctctgacacatgcagctcccggagacggtcacagcttgtctgtaagcggatgccgggagcagacaagcccgtcagggcgcgtcagcgggtgttggcgggtgtcggggctggcttaactatgcggcatcagagcagattgtactgagagtgcaccatatgcggtgtgaaataccgcacagatgcgtaaggagaaaataccgcatcaggcgccattcgccattcaggctgcgcaactgttgggaagggcgatcggtgcgggcctcttcgctattacgccagctggcgaaagggggatgtgctgcaaggcgattaagttgggtaacgccagggttttcccagtcacgacgttgtaaaacgacggccagtgaattgacgcgtattgggatatttaaat

SEQ ID NO: 259 - DNA, 4171 bp, Artificial Sequence
  pLMTB8599
atgcgtttccgcatttacaagcgcaaggtcctcattctgacgctcgtcgtggccgcctgcggctttgtgctgtggtccagcaacggtcgccagcgtaaaaacgacgccctggcaccaccgctgctggattcggagcccctgcgaggtgctgggcactttgcggcgtcagtggggatccgccgggtgtcgaatgactcggccgctcccctcgtaccggctgtcccccgccccgaggtggacaacctcaccctgcggtatcgctcgttggtttaccagctgaatttcgaccaaatgctgcgaaacgtggacaaggacggaacatggagtccgggtgaactcgtgcttgtggtgcaggttcataaccggccagagtaccttcgcctcttgatcgactcgctccgcaaggctcaaggaattcgggaggtgcttgtgatctttagccatgacttctggtctgcggaaatcaactcactcatttccagcgttgatttctgcccagttctccaggtgttctttccgttcagcatccagctctacccaagcgagtttccgggcagtgacccacgtgactgccctcgcgaccttaagaagaacgcagccctgaagctcgggtgcataaatgcagagtaccctgattccttcgggcactaccgggaagctaaattcagccagacgaagcaccactggtggtggaagcttcacttcgtgtgggagcgcgtgaaggtactccaggactacaccggcctcatcctgttcctcgaggaggatcactacctggcacccgacttttaccacgtgtttaagaaaatgtggaaactgaaacagcaggagtgcccaggctgtgacgtgctgtctcttggcacgtacaccaccatccgtagcttctacggcatcgccgataaagtagacgtcaagacttggaaaagtacagagcacaacatggggttggccctgacacgcgacgcataccagaagcttattgagtgtacagacacattttgcacgtacgacgactacaattgggactggactctgcaatacctcactctggcctgcctgccgaaggtctggaaggtgctggtgccacaggccccccgaatttttcatgccggtgactgcggaatgcatcataagaagacgtgtcgaccctctacccagagcgcccagattgagagcttgttgaataacaacaagcagtacctgtttccggagactctggtgattggcgagaagtttcctatggccgctatttcccccccgcggaagaacggcgggtggggggacatccgtgaccatgagctttgtaagagctaccgccgccttcagtagttagcgctccgtagctcgctgcgtatgagaggtactgagctccaatgcatcacacggcgtacggcaacacacactatcttttcagtttatttttttaattatccctccaaaaagaagcaactgacacttcaaaatattcccaacaaggagcgtgaggtcagtgaccagtctcggacttcacaccgcgcatgtagaagcacatttaaatatcccaatggcgcgccgagcttggctcgagcatggtcatagctgtttcctgtgtgaaattgttatccgctcacaattccacacaacatacgagccggaagcataaagtgtaaagcctggggtgcctaatgagtgagctaactcacattaattgcgttgcgctcactgcccgctttccagtcgggaaacctgtcgtgccagctgcattaatgaatcggccaacgcgcggggagaggcggtttgcgtattgggcgctcttccgcttcctcgctcactgactcgctgcgctcggtcgttcggctgcggcgagcggtatcagctcactcaaaggcggtaatacggttatccacagaatcaggggataacgcaggaaagaacatgtgagcaaaaggccagcaaaaggccaggaaccgtaaaaaggccgcgttgctggcgtttttccataggctccgcccccctgacgagcatcacaaaaatcgacgctcaagtcagaggtggcgaaacccgacaggactataaagataccaggcgtttccccctggaagctccctcgtgcgctctcctgttccgaccctgccgcttaccggatacctgtccgcctttctcccttcgggaagcgtggcgctttctcatagctcacgctgtaggtatctcagttcggtgtaggtcgttcgctccaagctgggctgtgtgcacgaaccccccgttcagcccgaccgctgcgccttatccggtaactatcgtcttgagtccaacccggtaagacacgacttatcgccactggcagcagccactggtaacaggattagcagagcgaggtatgtaggcggtgctacagagttcttgaagtggtggcctaactacggctacactagaagaacagtatttggtatctgcgctctgctgaagccagttaccttcggaaaaagagttggtagctcttgatccggcaaacaaaccaccgctggtagcggtggtttttttgtttgcaagcagcagattacgcgcagaaaaaaaggatctcaagaagatcctttgatcttttctacggggtctgacgctcagtggaacgaaaactcacgttaagggattttggtcatgagattatcaaaaaggatcttcacctagatccttttaaattaaaaatgaagttttaaatcaatctaaagtatatatgagtaaacttggtctgacagttagaaaaactcatcgagcatcaaatgaaactgcaatttattcatatcaggattatcaataccatatttttgaaaaagccgtttctgtaatgaaggagaaaactcaccgaggcagttccataggatggcaagatcctggtatcggtctgcgattccgactcgtccaacatcaatacaacctattaatttcccctcgtcaaaaataaggttatcaagtgagaaatcaccatgagtgacgactgaatccggtgagaatggcaaaagtttatgcatttctttccagacttgttcaacaggccagccattacgctcgtcatcaaaatcactcgcatcaaccaaaccgttattcattcgtgattgcgcctgagcgagacgaaatacgcgatcgctgttaaaaggacaattacaaacaggaatcgaatgcaaccggcgcaggaacactgccagcgcatcaacaatattttcacctgaatcaggatattcttctaatacctggaatgctgttttcccagggatcgcagtggtgagtaaccatgcatcatcaggagtacggataaaatgcttgatggtcggaagaggcataaattccgtcagccagtttagtctgaccatctcatctgtaacatcattggcaacgctacctttgccatgtttcagaaacaactctggcgcatcgggcttcccatacaatcgatagattgtcgcacctgattgcccgacattatcgcgagcccatttatacccatataaatcagcatccatgttggaatttaatcgcggcctagagcaagacgtttcccgttgaatatggctcatactcttcctttttcaatattattgaagcatttatcagggttattgtctcatgagcggatacatatttgaatgtatttagaaaaataaacaaataggggttccgcgcacatttccccgaaaagtgccacctgacgtctaagaaaccattattatcatgacattaacctataaaaataggcgtatcacgaggccctttcgtctcgcgcgtttcggtgatgacggtgaaaacctctgacacatgcagctcccggagacggtcacagcttgtctgtaagcggatgccgggagcagacaagcccgtcagggcgcgtcagcgggtgttggcgggtgtcggggctggcttaactatgcggcatcagagcagattgtactgagagtgcaccatatgcggtgtgaaataccgcacagatgcgtaaggagaaaataccgcatcaggcgccattcgccattcaggctgcgcaactgttgggaagggcgatcggtgcgggcctcttcgctattacgccagctggcgaaagggggatgtgctgcaaggcgattaagttgggtaacgccagggttttcccagtcacgacgttgtaaaacgacggccagtgaattgacgcgtattgggatatttaaat

SEQ ID NO: 260 - DNA, 3387 bp, Artificial Sequence
  pLMTB8629
ctgcatgccgagcggccagaagacaaagattgagaacgtgctccagaatagcggtaatcagctcttccctaagcagctcttgatcacgaagcgactgcccgcgtcgggggcgaagggcgtagccccccatgtgaagaacggcggttggggcgacatccgggaccacgaactgtgcaagtcttacctgcgccttcagtagcgagcgcgttgcctctgcgctggtgaacgtgcctgcgcacttacatctcagccgtgctttctgggaagaccttctgcgacgcggggcgctgtgctggtacagatggaaagatgtgcgccatcacggatgcatccttgcatggtgcgtgctcacgtgctcaccacagtttgtgtgtgtgtgtgtgtgagtgtgagtgtgagtgagagagagagtgtgtttcggcgcacctcccatccaacagtggcgtgaacggctttctctgtatgcgccctttcgttttaactctttctttttccgcctttgttttttgtgatttttgatgaactcaaacacaaaatgaacatccatgctgaagaagagctcgctcgtgctgtggggtgtggtactgttcgtggcatggaacgcccttatcttgttcttcctgtggactcgaccgcaaagcctctccgatcacagccatctcacggaggaggtgattcggcttgcgcaggatgccgagtctgaattggagcgtcagaaggacctgttgcagcagatctaccgttaatttaaatatcccaatggcgcgccgagcttggctcgagcatggtcatagctgtttcctgtgtgaaattgttatccgctcacaattccacacaacatacgagccggaagcataaagtgtaaagcctggggtgcctaatgagtgagctaactcacattaattgcgttgcgctcactgcccgctttccagtcgggaaacctgtcgtgccagctgcattaatgaatcggccaacgcgcggggagaggcggtttgcgtattgggcgctcttccgcttcctcgctcactgactcgctgcgctcggtcgttcggctgcggcgagcggtatcagctcactcaaaggcggtaatacggttatccacagaatcaggggataacgcaggaaagaacatgtgagcaaaaggccagcaaaaggccaggaaccgtaaaaaggccgcgttgctggcgtttttccataggctccgcccccctgacgagcatcacaaaaatcgacgctcaagtcagaggtggcgaaacccgacaggactataaagataccaggcgtttccccctggaagctccctcgtgcgctctcctgttccgaccctgccgcttaccggatacctgtccgcctttctcccttcgggaagcgtggcgctttctcatagctcacgctgtaggtatctcagttcggtgtaggtcgttcgctccaagctgggctgtgtgcacgaaccccccgttcagcccgaccgctgcgccttatccggtaactatcgtcttgagtccaacccggtaagacacgacttatcgccactggcagcagccactggtaacaggattagcagagcgaggtatgtaggcggtgctacagagttcttgaagtggtggcctaactacggctacactagaagaacagtatttggtatctgcgctctgctgaagccagttaccttcggaaaaagagttggtagctcttgatccggcaaacaaaccaccgctggtagcggtggtttttttgtttgcaagcagcagattacgcgcagaaaaaaaggatctcaagaagatcctttgatcttttctacggggtctgacgctcagtggaacgaaaactcacgttaagggattttggtcatgagattatcaaaaaggatcttcacctagatccttttaaattaaaaatgaagttttaaatcaatctaaagtatatatgagtaaacttggtctgacagttagaaaaactcatcgagcatcaaatgaaactgcaatttattcatatcaggattatcaataccatatttttgaaaaagccgtttctgtaatgaaggagaaaactcaccgaggcagttccataggatggcaagatcctggtatcggtctgcgattccgactcgtccaacatcaatacaacctattaatttcccctcgtcaaaaataaggttatcaagtgagaaatcaccatgagtgacgactgaatccggtgagaatggcaaaagtttatgcatttctttccagacttgttcaacaggccagccattacgctcgtcatcaaaatcactcgcatcaaccaaaccgttattcattcgtgattgcgcctgagcgagacgaaatacgcgatcgctgttaaaaggacaattacaaacaggaatcgaatgcaaccggcgcaggaacactgccagcgcatcaacaatattttcacctgaatcaggatattcttctaatacctggaatgctgttttcccagggatcgcagtggtgagtaaccatgcatcatcaggagtacggataaaatgcttgatggtcggaagaggcataaattccgtcagccagtttagtctgaccatctcatctgtaacatcattggcaacgctacctttgccatgtttcagaaacaactctggcgcatcgggcttcccatacaatcgatagattgtcgcacctgattgcccgacattatcgcgagcccatttatacccatataaatcagcatccatgttggaatttaatcgcggcctagagcaagacgtttcccgttgaatatggctcatactcttcctttttcaatattattgaagcatttatcagggttattgtctcatgagcggatacatatttgaatgtatttagaaaaataaacaaataggggttccgcgcacatttccccgaaaagtgccacctgacgtctaagaaaccattattatcatgacattaacctataaaaataggcgtatcacgaggccctttcgtctcgcgcgtttcggtgatgacggtgaaaacctctgacacatgcagctcccggagacggtcacagcttgtctgtaagcggatgccgggagcagacaagcccgtcagggcgcgtcagcgggtgttggcgggtgtcggggctggcttaactatgcggcatcagagcagattgtactgagagtgcaccatatgcggtgtgaaataccgcacagatgcgtaaggagaaaataccgcatcaggcgccattcgccattcaggctgcgcaactgttgggaagggcgatcggtgcgggcctcttcgctattacgccagctggcgaaagggggatgtgctgcaaggcgattaagttgggtaacgccagggttttcccagtcacgacgttgtaaaacgacggccagtgaattgacgcgtattgggatatttaaat

SEQ ID NO: 261 - DNA, 4909 bp, Artificial Sequence
  pLMTB8636
cagacgacggcgcagcggtggcagtgtggacgacaccagagagcgtcgaggcaggcgcggtgttcgcagagattggcccacgcatggcggagctgagcggcagccgcctggcagcacagcagcagatggagggcctgctggcaccgcaccgcccaaaggagccagcctggtttctggcgacagtgggcgtgtccccggaccaccagggcaagggcctgggcagcgcagtggtgctcccaggcgtcgaggctgcagagcgcgcaggcgtgccggcattcctggagacaagcgcgccacgcaacctgccgttctacgagcgcctgggcttcaccgtgacggcggacgtcgaggtgccagagggcccacgcacatggtgcatgacacgcaagccaggcgcgtaggtggtggaggcaaactatttgttgttaaaccagcactatattctcgtgtccaatcggtagtgcagtcatcgagtgaacgctgttcttagcaccttgattccaaaggggaatagtacataagatatgtgtcatgaggcgtgtacacaattatttctcttaggatttttttttagttgaaataggtccttgttgtgtcaccattagcgttgtccgagtgaggtcagcagaggtaccgtgcgcgcgtgaaagcacttgctgcccctgctctttggcgttggtgtaatgcactcagatatcgtctcactttttcttctttattgcccaaggtgggcagtgaggagacgatagtgagcacctatttcggacatgacgttcttctgtgtgccctcatctggagcacgaggcgctttcttgtgtctattatttttctacttgttccctgataagcaatgataccactgcctccgtgttgaaacacactggatcgcttgtagcctcactgagagtaaacttcttcatcagaaaacagacaggaatatgcggtttcggatctacaagcgcaaggtattgattcttactctcgtggtggcggcgtgcggctttgtgctgtggtctagcaatggccggcagcgtaagaatgacgcgttggctccgccgctgttggacagcgagccgcttcgcggggcgggccattttgccgcttcggtgggcatccgtcgtgtgtctaacgattcagccgcgccgctcgtgccggccgtccctcgtccggaggtggacaacctcaccttgcgataccgcagcctggtctaccaactcaatttcgaccagatgctgcgcaacgtagataaggacgggacatggtcgcccggcgagctggtactggtcgtgcaggtgcacaatcgtccagagtacctgcggctcctgatcgactcactgcgcaaggctcagggcatccgggaggtgctggtgatcttttctcacgacttctggtccgctgagattaacagcctgataagctctgtggacttttgcccagtacttcaggtattctttccattcagcattcagctgtacccctccgagtttccgggtagtgacccgcgcgattgcccgcgcgatctcaaaaagaatgccgcattgaagttgggctgcatcaatgcggagtatccagacagcttcggccactaccgtgaggccaagttctctcagacgaaacaccattggtggtggaagttgcatttcgtctgggagcgcgtgaaggtcctgcaggattacacaggcctgattctgttccttgaggaggatcactacctggcgcccgacttctaccatgtgttcaagaagatgtggaagctgaaacaacaagagtgccctggttgtgatgtgctcagtctcgggacctacaccaccattcgtagtttctacggcatcgctgacaaggtggacgtgaagacatggaaatcgacagagcacaacatgggtctggcattgacacgggatgcgtatcagaagctgattgagtgcaccgacacattctgcacgtacgacgattataactgggactggacgctgcagtaccttacgctggcgtgccttccgaaggtatggaaggtcctggtgccgcaggccccgcgaatcttccacgcgggtgattgcggcatgcaccacaagaagacgtgccgcccttccactcagtcagcccagatcgaaagcctgctcaataacaacaaacagtacctcttcccagaaaccctcgtgatcggcgagaagttccctatggcggcgatctccccgccccgtaagaacggggggtggggcgacatacgtgatcatgagctctgtaagtcgtatcgccgcctccaatagatttaaatatcccaatggcgcgccgagcttggctcgagcatggtcatagctgtttcctgtgtgaaattgttatccgctcacaattccacacaacatacgagccggaagcataaagtgtaaagcctggggtgcctaatgagtgagctaactcacattaattgcgttgcgctcactgcccgctttccagtcgggaaacctgtcgtgccagctgcattaatgaatcggccaacgcgcggggagaggcggtttgcgtattgggcgctcttccgcttcctcgctcactgactcgctgcgctcggtcgttcggctgcggcgagcggtatcagctcactcaaaggcggtaatacggttatccacagaatcaggggataacgcaggaaagaacatgtgagcaaaaggccagcaaaaggccaggaaccgtaaaaaggccgcgttgctggcgtttttccataggctccgcccccctgacgagcatcacaaaaatcgacgctcaagtcagaggtggcgaaacccgacaggactataaagataccaggcgtttccccctggaagctccctcgtgcgctctcctgttccgaccctgccgcttaccggatacctgtccgcctttctcccttcgggaagcgtggcgctttctcatagctcacgctgtaggtatctcagttcggtgtaggtcgttcgctccaagctgggctgtgtgcacgaaccccccgttcagcccgaccgctgcgccttatccggtaactatcgtcttgagtccaacccggtaagacacgacttatcgccactggcagcagccactggtaacaggattagcagagcgaggtatgtaggcggtgctacagagttcttgaagtggtggcctaactacggctacactagaagaacagtatttggtatctgcgctctgctgaagccagttaccttcggaaaaagagttggtagctcttgatccggcaaacaaaccaccgctggtagcggtggtttttttgtttgcaagcagcagattacgcgcagaaaaaaaggatctcaagaagatcctttgatcttttctacggggtctgacgctcagtggaacgaaaactcacgttaagggattttggtcatgagattatcaaaaaggatcttcacctagatccttttaaattaaaaatgaagttttaaatcaatctaaagtatatatgagtaaacttggtctgacagttagaaaaactcatcgagcatcaaatgaaactgcaatttattcatatcaggattatcaataccatatttttgaaaaagccgtttctgtaatgaaggagaaaactcaccgaggcagttccataggatggcaagatcctggtatcggtctgcgattccgactcgtccaacatcaatacaacctattaatttcccctcgtcaaaaataaggttatcaagtgagaaatcaccatgagtgacgactgaatccggtgagaatggcaaaagtttatgcatttctttccagacttgttcaacaggccagccattacgctcgtcatcaaaatcactcgcatcaaccaaaccgttattcattcgtgattgcgcctgagcgagacgaaatacgcgatcgctgttaaaaggacaattacaaacaggaatcgaatgcaaccggcgcaggaacactgccagcgcatcaacaatattttcacctgaatcaggatattcttctaatacctggaatgctgttttcccagggatcgcagtggtgagtaaccatgcatcatcaggagtacggataaaatgcttgatggtcggaagaggcataaattccgtcagccagtttagtctgaccatctcatctgtaacatcattggcaacgctacctttgccatgtttcagaaacaactctggcgcatcgggcttcccatacaatcgatagattgtcgcacctgattgcccgacattatcgcgagcccatttatacccatataaatcagcatccatgttggaatttaatcgcggcctagagcaagacgtttcccgttgaatatggctcatactcttcctttttcaatattattgaagcatttatcagggttattgtctcatgagcggatacatatttgaatgtatttagaaaaataaacaaataggggttccgcgcacatttccccgaaaagtgccacctgacgtctaagaaaccattattatcatgacattaacctataaaaataggcgtatcacgaggccctttcgtctcgcgcgtttcggtgatgacggtgaaaacctctgacacatgcagctcccggagacggtcacagcttgtctgtaagcggatgccgggagcagacaagcccgtcagggcgcgtcagcgggtgttggcgggtgtcggggctggcttaactatgcggcatcagagcagattgtactgagagtgcaccatatgcggtgtgaaataccgcacagatgcgtaaggagaaaataccgcatcaggcgccattcgccattcaggctgcgcaactgttgggaagggcgatcggtgcgggcctcttcgctattacgccagctggcgaaagggggatgtgctgcaaggcgattaagttgggtaacgccagggttttcccagtcacgacgttgtaaaacgacggccagtgaattgacgcgtattgggatatttaaat

SEQ ID NO: 262 - DNA, 3993 bp, Artificial Sequence
  pLMTB8698
tcgcgcgtttcggtgatgacggtgaaaacctctgacacatgcagctcccggagacggtcacagcttgtctgtaagcggatgccgggagcagacaagcccgtcagggcgcgtcagcgggtgttggcgggtgtcggggctggcttaactatgcggcatcagagcagattgtactgagagtgcaccatatgcggtgtgaaataccgcacagatgcgtaaggagaaaataccgcatcaggcgccattcgccattcaggctgcgcaactgttgggaagggcgatcggtgcgggcctcttcgctattacgccagctggcgaaagggggatgtgctgcaaggcgattaagttgggtaacgccagggttttcccagtcacgacgttgtaaaacgacggccagtgaattgacgcgtattgggatatttaaatggtacccgggggcagcggtgttggcggaacggccaacgccctgccccctccccgccctgcgacgtttctgcgcacccgttctctccttcctgcgtgcgtgtctgcgcgcatgcacatctgtccgcgtgtgccgcagcgctggtatttttgtgagggcagagccctgcctccccgcctctctgccgttggcaggtgaagcgaaaacgaagcgagagggcagtctgcatgtgtgtgcgagggcatgcggagcccccctccccccgccccctgccgtgctgcaccgctattgtggcgtcttctctcgttgtgcgcaagtgtggctgcaccacggccgcctcatgtgcgtgtgtgcgcatgtacacacacacacacacacacacacacacacgggcaggcgcacgctcctctctcttcagggagcgccgccccgctggtgtcattggacgagcatccgccgcgcatctcttcacccctcacccctcatccctctcccctctccccgcacacacacgcagtccttcgctttcactcttcgaacaaacacctcaaccatcttatcacctttctctcttccttgtcaaccatgatcgcgagcagcgtgcgccacgcggtgatcctgctgctggtggcggtggcgatgatggtgaacaacgtgatcgcggaggtgcagctggtggagagcggcggcggcctggtgcagccgggccgcagcctgcgcctgagctgcgcggcgagcggcttcacgttcgacgactacgcgatgcactgggtgcgccaggcgccgggcaagggcctggagtgggtgagcgcgatcacgtggaacagcggccacatcgactacgcggacagcgtggagggccgcttcacgatcagccgcgacaacgcgaacaacagcctgtacctgcagatgaacagcctgcgcgcggaggacacggcggtgtactactgcgcgaaggtgagctacctgagcacggcgagcagcctggactactggggccagggcacgctggtgacggtgagcagcgcgagcacgaagggcccgagcgtgttcccgctggcgccgagcagcaagagcacgagcggcggcacggcggcgctgggctgcctggtgaaggactacttcccggagccggtgacggtgagctggaacagcggcgcgctgacgagcggcgtgcacacgttcccggcggtgctgcagagcagcggcctgtacagcctgagcagcgtggtgacggtgccgagcagcagcctgggcacgcagacgtacatctgcaacgtgaaccacaagccgagcaacacgaaggtggacaagaaggtggagccgaagagctgcgacaagacgcacggtaccatttaaatatcccaatggcgcgccgagcttggctcgagcatggtcatagctgtttcctgtgtgaaattgttatccgctcacaattccacacaacatacgagccggaagcataaagtgtaaagcctggggtgcctaatgagtgagctaactcacattaattgcgttgcgctcactgcccgctttccagtcgggaaacctgtcgtgccagctgcattaatgaatcggccaacgcgcggggagaggcggtttgcgtattgggcgctcttccgcttcctcgctcactgactcgctgcgctcggtcgttcggctgcggcgagcggtatcagctcactcaaaggcggtaatacggttatccacagaatcaggggataacgcaggaaagaacatgtgagcaaaaggccagcaaaaggccaggaaccgtaaaaaggccgcgttgctggcgtttttccataggctccgcccccctgacgagcatcacaaaaatcgacgctcaagtcagaggtggcgaaacccgacaggactataaagataccaggcgtttccccctggaagctccctcgtgcgctctcctgttccgaccctgccgcttaccggatacctgtccgcctttctcccttcgggaagcgtggcgctttctcatagctcacgctgtaggtatctcagttcggtgtaggtcgttcgctccaagctgggctgtgtgcacgaaccccccgttcagcccgaccgctgcgccttatccggtaactatcgtcttgagtccaacccggtaagacacgacttatcgccactggcagcagccactggtaacaggattagcagagcgaggtatgtaggcggtgctacagagttcttgaagtggtggcctaactacggctacactagaagaacagtatttggtatctgcgctctgctgaagccagttaccttcggaaaaagagttggtagctcttgatccggcaaacaaaccaccgctggtagcggtggtttttttgtttgcaagcagcagattacgcgcagaaaaaaaggatctcaagaagatcctttgatcttttctacggggtctgacgctcagtggaacgaaaactcacgttaagggattttggtcatgagattatcaaaaaggatcttcacctagatccttttaaattaaaaatgaagttttaaatcaatctaaagtatatatgagtaaacttggtctgacagttagaaaaactcatcgagcatcaaatgaaactgcaatttattcatatcaggattatcaataccatatttttgaaaaagccgtttctgtaatgaaggagaaaactcaccgaggcagttccataggatggcaagatcctggtatcggtctgcgattccgactcgtccaacatcaatacaacctattaatttcccctcgtcaaaaataaggttatcaagtgagaaatcaccatgagtgacgactgaatccggtgagaatggcaaaagtttatgcatttctttccagacttgttcaacaggccagccattacgctcgtcatcaaaatcactcgcatcaaccaaaccgttattcattcgtgattgcgcctgagcgagacgaaatacgcgatcgctgttaaaaggacaattacaaacaggaatcgaatgcaaccggcgcaggaacactgccagcgcatcaacaatattttcacctgaatcaggatattcttctaatacctggaatgctgttttcccagggatcgcagtggtgagtaaccatgcatcatcaggagtacggataaaatgcttgatggtcggaagaggcataaattccgtcagccagtttagtctgaccatctcatctgtaacatcattggcaacgctacctttgccatgtttcagaaacaactctggcgcatcgggcttcccatacaatcgatagattgtcgcacctgattgcccgacattatcgcgagcccatttatacccatataaatcagcatccatgttggaatttaatcgcggcctagagcaagacgtttcccgttgaatatggctcatactcttcctttttcaatattattgaagcatttatcagggttattgtctcatgagcggatacatatttgaatgtatttagaaaaataaacaaataggggttccgcgcacatttccccgaaaagtgccacctgacgtctaagaaaccattattatcatgacattaacctataaaaataggcgtatcacgaggccctttcgtc

SEQ ID NO: 263 - DNA, 4065 bp, Artificial Sequence
  pLMTB8821
gcagctctctctagcgacggccgcatcttcactggtgtcaatgtatatcattttactgggggaccttgtgcagaactcgtggtgctgggcactgctgctgctgcggcagctggcaacctgacttgtatcgtcgcgatcggaaatgagaacaggggcatcttgagcccctgcggacggtgccgacaggtgcttctcgatctgcatcctgggatcaaagccatagtgaaggacagtgatggacagccgacggcagttgggattcgtgaattgctgccctctggttatgtgtgggagggctaactagcctcggagatccactagttctagttctaggggccgaattcagatcctcgtgtgagcgttcgcggaatcggtcgctcgtgtttatgcccgtcttggtgttgtgctcgcaaggcggtgcagcaggataccgtcgccctcctctctccttgcttctctgttcttcaattcgcgatctcacagaggccggctgtgcacgcccttcctcaccctccttttcccacctctcggccaccggtcggctccgttccgtctgccgtcgagaagggacgggcatgtgcagctcctccctttctctcgcgcgcgcatcttctcttgcttgtggcactcacgctcatgcgtcaaggcggccccacgccgagcccctgcgctcccttccctcttgcgcatccgtagcgcggatgccgtcgatgcgcaaggccggcatgaaggagcgcgtgccctcaagagggcacactatcatgccctacgtgggccacgcagcgatgaggccggcttcggcggagatgcgtcacgcacgtgccagatgatgcgctacgccttccttgacttgcgcccccctctcttcctccgtctctcactctctctctctcacacacacacacacacacacacacacacaaatgatgtcccctgaagatgcgaccgggctggaggctgcacgcaagcagaagatccataacctgaagctgaagacggcgtgcctagagaatgaggagcttgtgcaggagctgcacatctctgactggtcagagacgcagcgacagaagctgcgcggcgcccatgagaagggcgaggagctgcttgcgtccgtggaggttgggacgaagtggaacctgatggaggcgtacgacctggcgaagctgatgcgcgtgtgcgggctggagatgagtcagcgcgagctgtaccgcccggaggacaagccgcagttcatggacatcattggcgtgaagaaggtgctacaggaccttcgacagaaccggaacaagacgcgcgttgtgagcttcacgcagctgatcgacaacagcatcgcgaagatggagaaggtggaggaggagctgcggcggtcgcagctggacgcgacgcagctcgcgcaggtgccgtctcggacggtgaagatgatatttaaatatcccaatggcgcgccgagcttggctcgagcatggtcatagctgtttcctgtgtgaaattgttatccgctcacaattccacacaacatacgagccggaagcataaagtgtaaagcctggggtgcctaatgagtgagctaactcacattaattgcgttgcgctcactgcccgctttccagtcgggaaacctgtcgtgccagctgcattaatgaatcggccaacgcgcggggagaggcggtttgcgtattgggcgctcttccgcttcctcgctcactgactcgctgcgctcggtcgttcggctgcggcgagcggtatcagctcactcaaaggcggtaatacggttatccacagaatcaggggataacgcaggaaagaacatgtgagcaaaaggccagcaaaaggccaggaaccgtaaaaaggccgcgttgctggcgtttttccataggctccgcccccctgacgagcatcacaaaaatcgacgctcaagtcagaggtggcgaaacccgacaggactataaagataccaggcgtttccccctggaagctccctcgtgcgctctcctgttccgaccctgccgcttaccggatacctgtccgcctttctcccttcgggaagcgtggcgctttctcatagctcacgctgtaggtatctcagttcggtgtaggtcgttcgctccaagctgggctgtgtgcacgaaccccccgttcagcccgaccgctgcgccttatccggtaactatcgtcttgagtccaacccggtaagacacgacttatcgccactggcagcagccactggtaacaggattagcagagcgaggtatgtaggcggtgctacagagttcttgaagtggtggcctaactacggctacactagaagaacagtatttggtatctgcgctctgctgaagccagttaccttcggaaaaagagttggtagctcttgatccggcaaacaaaccaccgctggtagcggtggtttttttgtttgcaagcagcagattacgcgcagaaaaaaaggatctcaagaagatcctttgatcttttctacggggtctgacgctcagtggaacgaaaactcacgttaagggattttggtcatgagattatcaaaaaggatcttcacctagatccttttaaattaaaaatgaagttttaaatcaatctaaagtatatatgagtaaacttggtctgacagttagaaaaactcatcgagcatcaaatgaaactgcaatttattcatatcaggattatcaataccatatttttgaaaaagccgtttctgtaatgaaggagaaaactcaccgaggcagttccataggatggcaagatcctggtatcggtctgcgattccgactcgtccaacatcaatacaacctattaatttcccctcgtcaaaaataaggttatcaagtgagaaatcaccatgagtgacgactgaatccggtgagaatggcaaaagtttatgcatttctttccagacttgttcaacaggccagccattacgctcgtcatcaaaatcactcgcatcaaccaaaccgttattcattcgtgattgcgcctgagcgagacgaaatacgcgatcgctgttaaaaggacaattacaaacaggaatcgaatgcaaccggcgcaggaacactgccagcgcatcaacaatattttcacctgaatcaggatattcttctaatacctggaatgctgttttcccagggatcgcagtggtgagtaaccatgcatcatcaggagtacggataaaatgcttgatggtcggaagaggcataaattccgtcagccagtttagtctgaccatctcatctgtaacatcattggcaacgctacctttgccatgtttcagaaacaactctggcgcatcgggcttcccatacaatcgatagattgtcgcacctgattgcccgacattatcgcgagcccatttatacccatataaatcagcatccatgttggaatttaatcgcggcctagagcaagacgtttcccgttgaatatggctcatactcttcctttttcaatattattgaagcatttatcagggttattgtctcatgagcggatacatatttgaatgtatttagaaaaataaacaaataggggttccgcgcacatttccccgaaaagtgccacctgacgtctaagaaaccattattatcatgacattaacctataaaaataggcgtatcacgaggccctttcgtctcgcgcgtttcggtgatgacggtgaaaacctctgacacatgcagctcccggagacggtcacagcttgtctgtaagcggatgccgggagcagacaagcccgtcagggcgcgtcagcgggtgttggcgggtgtcggggctggcttaactatgcggcatcagagcagattgtactgagagtgcaccatatgcggtgtgaaataccgcacagatgcgtaaggagaaaataccgcatcaggcgccattcgccattcaggctgcgcaactgttgggaagggcgatcggtgcgggcctcttcgctattacgccagctggcgaaagggggatgtgctgcaaggcgattaagttgggtaacgccagggttttcccagtcacgacgttgtaaaacgacggccagtgaattgacgcgtattgggatatttaaat

SEQ ID NO: 264 - DNA, 4166 bp, Artificial Sequence
  pLMTB8822
cagacgacggcgcagcggtggcagtgtggacgacaccagagagcgtcgaggcaggcgcggtgttcgcagagattggcccacgcatggcggagctgagcggcagccgcctggcagcacagcagcagatggagggcctgctggcaccgcaccgcccaaaggagccagcctggtttctggcgacagtgggcgtgtccccggaccaccagggcaagggcctgggcagcgcagtggtgctcccaggcgtcgaggctgcagagcgcgcaggcgtgccggcattcctggagacaagcgcgccacgcaacctgccgttctacgagcgcctgggcttcaccgtgacggcggacgtcgaggtgccagagggcccacgcacatggtgcatgacacgcaagccaggcgcgtagctagcctcggagatccactagttctagttctaggggccgaattcagatcctcgtgtgagcgttcgcggaatcggtcgctcgtgtttatgcccgtcttggtgttgtgctcgcaaggcggtgcagcaggataccgtcgccctcctctctccttgcttctctgttcttcaattcgcgatctcacagaggccggctgtgcacgcccttcctcaccctccttttcccacctctcggccaccggtcggctccgttccgtctgccgtcgagaagggacgggcatgtgcagctcctccctttctctcgcgcgcgcatcttctcttgcttgtggcactcacgctcatgcgtcaaggcggccccacgccgagcccctgcgctcccttccctcttgcgcatccgtagcgcggatgccgtcgatgcgcaaggccggcatgaaggagcgcgtgccctcaagagggcacactatcatgccctacgtgggccacgcagcgatgaggccggcttcggcggagatgcgtcacgcacgtgccagatgatgcgctacgccttccttgacttgcgcccccctctcttcctccgtctctcactctctctctctcacacacacacacacacacacacacacacaaatgatgtcccctgaagatgcgaccgggctggaggctgcacgcaagcagaagatccataacctgaagctgaagacggcgtgcctagagaatgaggagcttgtgcaggagctgcacatctctgactggtcagagacgcagcgacagaagctgcgcggcgcccatgagaagggcgaggagctgcttgcgtccgtggaggttgggacgaagtggaacctgatggaggcgtacgacctggcgaagctgatgcgcgtgtgcgggctggagatgagtcagcgcgagctgtaccgcccggaggacaagccgcagttcatggacatcattggcgtgaagaaggtgctacaggaccttcgacagaaccggaacaagacgcgcgttgtgagcttcacgcagctgatcgacaacagcatcgcgaagatggagaaggtggaggaggagctgcggcggtcgcagctggacgcgacgcagctcgcgcaggtgccgtctcggacggtgaagatgatatttaaatatcccaatggcgcgccgagcttggctcgagcatggtcatagctgtttcctgtgtgaaattgttatccgctcacaattccacacaacatacgagccggaagcataaagtgtaaagcctggggtgcctaatgagtgagctaactcacattaattgcgttgcgctcactgcccgctttccagtcgggaaacctgtcgtgccagctgcattaatgaatcggccaacgcgcggggagaggcggtttgcgtattgggcgctcttccgcttcctcgctcactgactcgctgcgctcggtcgttcggctgcggcgagcggtatcagctcactcaaaggcggtaatacggttatccacagaatcaggggataacgcaggaaagaacatgtgagcaaaaggccagcaaaaggccaggaaccgtaaaaaggccgcgttgctggcgtttttccataggctccgcccccctgacgagcatcacaaaaatcgacgctcaagtcagaggtggcgaaacccgacaggactataaagataccaggcgtttccccctggaagctccctcgtgcgctctcctgttccgaccctgccgcttaccggatacctgtccgcctttctcccttcgggaagcgtggcgctttctcatagctcacgctgtaggtatctcagttcggtgtaggtcgttcgctccaagctgggctgtgtgcacgaaccccccgttcagcccgaccgctgcgccttatccggtaactatcgtcttgagtccaacccggtaagacacgacttatcgccactggcagcagccactggtaacaggattagcagagcgaggtatgtaggcggtgctacagagttcttgaagtggtggcctaactacggctacactagaagaacagtatttggtatctgcgctctgctgaagccagttaccttcggaaaaagagttggtagctcttgatccggcaaacaaaccaccgctggtagcggtggtttttttgtttgcaagcagcagattacgcgcagaaaaaaaggatctcaagaagatcctttgatcttttctacggggtctgacgctcagtggaacgaaaactcacgttaagggattttggtcatgagattatcaaaaaggatcttcacctagatccttttaaattaaaaatgaagttttaaatcaatctaaagtatatatgagtaaacttggtctgacagttagaaaaactcatcgagcatcaaatgaaactgcaatttattcatatcaggattatcaataccatatttttgaaaaagccgtttctgtaatgaaggagaaaactcaccgaggcagttccataggatggcaagatcctggtatcggtctgcgattccgactcgtccaacatcaatacaacctattaatttcccctcgtcaaaaataaggttatcaagtgagaaatcaccatgagtgacgactgaatccggtgagaatggcaaaagtttatgcatttctttccagacttgttcaacaggccagccattacgctcgtcatcaaaatcactcgcatcaaccaaaccgttattcattcgtgattgcgcctgagcgagacgaaatacgcgatcgctgttaaaaggacaattacaaacaggaatcgaatgcaaccggcgcaggaacactgccagcgcatcaacaatattttcacctgaatcaggatattcttctaatacctggaatgctgttttcccagggatcgcagtggtgagtaaccatgcatcatcaggagtacggataaaatgcttgatggtcggaagaggcataaattccgtcagccagtttagtctgaccatctcatctgtaacatcattggcaacgctacctttgccatgtttcagaaacaactctggcgcatcgggcttcccatacaatcgatagattgtcgcacctgattgcccgacattatcgcgagcccatttatacccatataaatcagcatccatgttggaatttaatcgcggcctagagcaagacgtttcccgttgaatatggctcatactcttcctttttcaatattattgaagcatttatcagggttattgtctcatgagcggatacatatttgaatgtatttagaaaaataaacaaataggggttccgcgcacatttccccgaaaagtgccacctgacgtctaagaaaccattattatcatgacattaacctataaaaataggcgtatcacgaggccctttcgtctcgcgcgtttcggtgatgacggtgaaaacctctgacacatgcagctcccggagacggtcacagcttgtctgtaagcggatgccgggagcagacaagcccgtcagggcgcgtcagcgggtgttggcgggtgtcggggctggcttaactatgcggcatcagagcagattgtactgagagtgcaccatatgcggtgtgaaataccgcacagatgcgtaaggagaaaataccgcatcaggcgccattcgccattcaggctgcgcaactgttgggaagggcgatcggtgcgggcctcttcgctattacgccagctggcgaaagggggatgtgctgcaaggcgattaagttgggtaacgccagggttttcccagtcacgacgttgtaaaacgacggccagtgaattgacgcgtattgggatatttaaat

SEQ ID NO: 265 - DNA, 3582 bp, Artificial Sequence
  pLMTB8823
gtagcgggcctttccgcgtccagtactcctctcgtgattcgttcaaggtgcttgcacggaacctgggggtcatggacgacctgaaatcaggcgttccacgcgccggataccgcggggtcgtgagttttatctcgcgaggccggcgcatttacctggcacccccggagggctggacgaagtacgacgttagctggtcttgactgcgttacgcgcacactcgcatgggatagaggagaggagtgtttcgaatgtaaatagtttctccccaggaatgtgtctaagcgcgaacaaataatacgaacagtgaacacgccgcagccttgctgtgcattcagactgcctttgacaaagagacatacgcatagccacgcaaagatgccgttgacccaccgtcttgctctcgtgttgcgcaacatgtccttccgtcattttttcacctgtgtccatgtcaacttcccttcctaccattgatgccgagtcatcatctccgcggctttggttatgcgcacttttccgaaacgccggctactctcagcttttccctccgcttttcacctctattgacttacataccctaagctgcaggtgctgaagcttcccagcttgtggttgcaaaagtagcagctgctggttcaaacacgcatctacgaaagcaaatagaaaaaaacgccggaaactccgtgcacacgcaaacacgcgtacgggcacagcgcagacaaggaacacggaacaacatcacaatgcgtttccgcatttacaagcgcaaggtcctcattctgacgctcgtcgtggccgcctgcggctttgtgctgtggtccagcaacggtcgccagcgtaaaaacgacgccctggcaccaccgctgctggattcggagcccctgcgaggtgctgggcactttgcggcgtcagtggggatccgccgggtgtcgaatgactcggcatttaaatatcccaatggcgcgccgagcttggctcgagcatggtcatagctgtttcctgtgtgaaattgttatccgctcacaattccacacaacatacgagccggaagcataaagtgtaaagcctggggtgcctaatgagtgagctaactcacattaattgcgttgcgctcactgcccgctttccagtcgggaaacctgtcgtgccagctgcattaatgaatcggccaacgcgcggggagaggcggtttgcgtattgggcgctcttccgcttcctcgctcactgactcgctgcgctcggtcgttcggctgcggcgagcggtatcagctcactcaaaggcggtaatacggttatccacagaatcaggggataacgcaggaaagaacatgtgagcaaaaggccagcaaaaggccaggaaccgtaaaaaggccgcgttgctggcgtttttccataggctccgcccccctgacgagcatcacaaaaatcgacgctcaagtcagaggtggcgaaacccgacaggactataaagataccaggcgtttccccctggaagctccctcgtgcgctctcctgttccgaccctgccgcttaccggatacctgtccgcctttctcccttcgggaagcgtggcgctttctcatagctcacgctgtaggtatctcagttcggtgtaggtcgttcgctccaagctgggctgtgtgcacgaaccccccgttcagcccgaccgctgcgccttatccggtaactatcgtcttgagtccaacccggtaagacacgacttatcgccactggcagcagccactggtaacaggattagcagagcgaggtatgtaggcggtgctacagagttcttgaagtggtggcctaactacggctacactagaagaacagtatttggtatctgcgctctgctgaagccagttaccttcggaaaaagagttggtagctcttgatccggcaaacaaaccaccgctggtagcggtggtttttttgtttgcaagcagcagattacgcgcagaaaaaaaggatctcaagaagatcctttgatcttttctacggggtctgacgctcagtggaacgaaaactcacgttaagggattttggtcatgagattatcaaaaaggatcttcacctagatccttttaaattaaaaatgaagttttaaatcaatctaaagtatatatgagtaaacttggtctgacagttagaaaaactcatcgagcatcaaatgaaactgcaatttattcatatcaggattatcaataccatatttttgaaaaagccgtttctgtaatgaaggagaaaactcaccgaggcagttccataggatggcaagatcctggtatcggtctgcgattccgactcgtccaacatcaatacaacctattaatttcccctcgtcaaaaataaggttatcaagtgagaaatcaccatgagtgacgactgaatccggtgagaatggcaaaagtttatgcatttctttccagacttgttcaacaggccagccattacgctcgtcatcaaaatcactcgcatcaaccaaaccgttattcattcgtgattgcgcctgagcgagacgaaatacgcgatcgctgttaaaaggacaattacaaacaggaatcgaatgcaaccggcgcaggaacactgccagcgcatcaacaatattttcacctgaatcaggatattcttctaatacctggaatgctgttttcccagggatcgcagtggtgagtaaccatgcatcatcaggagtacggataaaatgcttgatggtcggaagaggcataaattccgtcagccagtttagtctgaccatctcatctgtaacatcattggcaacgctacctttgccatgtttcagaaacaactctggcgcatcgggcttcccatacaatcgatagattgtcgcacctgattgcccgacattatcgcgagcccatttatacccatataaatcagcatccatgttggaatttaatcgcggcctagagcaagacgtttcccgttgaatatggctcatactcttcctttttcaatattattgaagcatttatcagggttattgtctcatgagcggatacatatttgaatgtatttagaaaaataaacaaataggggttccgcgcacatttccccgaaaagtgccacctgacgtctaagaaaccattattatcatgacattaacctataaaaataggcgtatcacgaggccctttcgtctcgcgcgtttcggtgatgacggtgaaaacctctgacacatgcagctcccggagacggtcacagcttgtctgtaagcggatgccgggagcagacaagcccgtcagggcgcgtcagcgggtgttggcgggtgtcggggctggcttaactatgcggcatcagagcagattgtactgagagtgcaccatatgcggtgtgaaataccgcacagatgcgtaaggagaaaataccgcatcaggcgccattcgccattcaggctgcgcaactgttgggaagggcgatcggtgcgggcctcttcgctattacgccagctggcgaaagggggatgtgctgcaaggcgattaagttgggtaacgccagggttttcccagtcacgacgttgtaaaacgacggccagtgaattgacgcgtattgggatatttaaat

SEQ ID NO: 266 - DNA, 4179 bp, Artificial Sequence
  pLMTB8994
cgcaaggaatcggtcaatacactacatggcgtgatttcatatgcgcgattgctgatccccatgtgtatcactggcaaactgtgatggacgacaccgtcagtgcgtccgtcgcgcaggctctcgatgagctgatgctttgggccgaggactgccccgaagtccggcacctcgtgcacgcggatttcggctccaacaatgtcctgacggacaatggccgcataacagcggtcattgactggagcgaggcgatgttcggggattcccaatacgaggtcgccaacatcttcttctggaggccgtggttggcttgtatggagcagcagacgcgctacttcgagcggaggcatccggagcttgcaggatcgccgcggctccgggcgtatatgctccgcattggtcttgaccaactctatcagagcttggttgacggcaatttcgatgatgcagcttgggcgcagggtcgatgcgacgcaatcgtccgatccggagccgggactgtcgggcgtacacaaatcgcccgcagaagcgcggccgtctggaccgatggctgtgtagaagtactcgccgatagtggaaaccgacgccccagcactcgtccgagggcaaaggaatagctagcctcggagatccactagttctagttctaggggccgaattcagatcctcgtgtgagcgttcgcggaatcggtcgctcgtgtttatgcccgtcttggtgttgtgctcgcaaggcggtgcagcaggataccgtcgccctcctctctccttgcttctctgttcttcaattcgcgatctcacagaggccggctgtgcacgcccttcctcaccctccttttcccacctctcggccaccggtcggctccgttccgtctgccgtcgagaagggacgggcatgtgcagctcctccctttctctcgcgcgcgcatcttctcttgcttgtggcactcacgctcatgcgtcaaggcggccccacgccgagcccctgcgctcccttccctcttgcgcatccgtagcgcggatgccgtcgatgcgcaaggccggcatgaaggagcgcgtgccctcaagagggcacactatcatgccctacgtgggccacgcagcgatgaggccggcttcggcggagatgcgtcacgcacgtgccagatgatgcgctacgccttccttgacttgcgcccccctctcttcctccgtctctcactctctctctctcacacacacacacacacacacacacacacaaagctccggttcgtccggccgtaacgccttttcaactcacggcctctaggaatgaaggagggtagttcgggggagaacgtactggggcgtcagaggtgaaattcttagaccgcaccaagacgaactacagcgaaggcattcttcaaggataccttcctcaatcaagaaccaaagtgtggagatcgaagatgattagagaccattgtagtccacactgcaaacgatgacacccatgaattggggatcttatgggccggccagcggcagggtttaccctgtgtcagcaccgcgcccgcttttaatttaaatatcccaatggcgcgccgagcttggctcgagcatggtcatagctgtttcctgtgtgaaattgttatccgctcacaattccacacaacatacgagccggaagcataaagtgtaaagcctggggtgcctaatgagtgagctaactcacattaattgcgttgcgctcactgcccgctttccagtcgggaaacctgtcgtgccagctgcattaatgaatcggccaacgcgcggggagaggcggtttgcgtattgggcgctcttccgcttcctcgctcactgactcgctgcgctcggtcgttcggctgcggcgagcggtatcagctcactcaaaggcggtaatacggttatccacagaatcaggggataacgcaggaaagaacatgtgagcaaaaggccagcaaaaggccaggaaccgtaaaaaggccgcgttgctggcgtttttccataggctccgcccccctgacgagcatcacaaaaatcgacgctcaagtcagaggtggcgaaacccgacaggactataaagataccaggcgtttccccctggaagctccctcgtgcgctctcctgttccgaccctgccgcttaccggatacctgtccgcctttctcccttcgggaagcgtggcgctttctcatagctcacgctgtaggtatctcagttcggtgtaggtcgttcgctccaagctgggctgtgtgcacgaaccccccgttcagcccgaccgctgcgccttatccggtaactatcgtcttgagtccaacccggtaagacacgacttatcgccactggcagcagccactggtaacaggattagcagagcgaggtatgtaggcggtgctacagagttcttgaagtggtggcctaactacggctacactagaagaacagtatttggtatctgcgctctgctgaagccagttaccttcggaaaaagagttggtagctcttgatccggcaaacaaaccaccgctggtagcggtggtttttttgtttgcaagcagcagattacgcgcagaaaaaaaggatctcaagaagatcctttgatcttttctacggggtctgacgctcagtggaacgaaaactcacgttaagggattttggtcatgagattatcaaaaaggatcttcacctagatccttttaaattaaaaatgaagttttaaatcaatctaaagtatatatgagtaaacttggtctgacagttagaaaaactcatcgagcatcaaatgaaactgcaatttattcatatcaggattatcaataccatatttttgaaaaagccgtttctgtaatgaaggagaaaactcaccgaggcagttccataggatggcaagatcctggtatcggtctgcgattccgactcgtccaacatcaatacaacctattaatttcccctcgtcaaaaataaggttatcaagtgagaaatcaccatgagtgacgactgaatccggtgagaatggcaaaagtttatgcatttctttccagacttgttcaacaggccagccattacgctcgtcatcaaaatcactcgcatcaaccaaaccgttattcattcgtgattgcgcctgagcgagacgaaatacgcgatcgctgttaaaaggacaattacaaacaggaatcgaatgcaaccggcgcaggaacactgccagcgcatcaacaatattttcacctgaatcaggatattcttctaatacctggaatgctgttttcccagggatcgcagtggtgagtaaccatgcatcatcaggagtacggataaaatgcttgatggtcggaagaggcataaattccgtcagccagtttagtctgaccatctcatctgtaacatcattggcaacgctacctttgccatgtttcagaaacaactctggcgcatcgggcttcccatacaatcgatagattgtcgcacctgattgcccgacattatcgcgagcccatttatacccatataaatcagcatccatgttggaatttaatcgcggcctagagcaagacgtttcccgttgaatatggctcatactcttcctttttcaatattattgaagcatttatcagggttattgtctcatgagcggatacatatttgaatgtatttagaaaaataaacaaataggggttccgcgcacatttccccgaaaagtgccacctgacgtctaagaaaccattattatcatgacattaacctataaaaataggcgtatcacgaggccctttcgtctcgcgcgtttcggtgatgacggtgaaaacctctgacacatgcagctcccggagacggtcacagcttgtctgtaagcggatgccgggagcagacaagcccgtcagggcgcgtcagcgggtgttggcgggtgtcggggctggcttaactatgcggcatcagagcagattgtactgagagtgcaccatatgcggtgtgaaataccgcacagatgcgtaaggagaaaataccgcatcaggcgccattcgccattcaggctgcgcaactgttgggaagggcgatcggtgcgggcctcttcgctattacgccagctggcgaaagggggatgtgctgcaaggcgattaagttgggtaacgccagggttttcccagtcacgacgttgtaaaacgacggccagtgaattgacgcgtattgggatatttaaat

SEQ ID NO: 267 - DNA, 3434 bp, Artificial Sequence
  pLMTB9070
gcgcagacccggtgcgtgttatgtactccaatgccaagacatatcagcgcgccgcgaaaaagctcggcctgatggacgacttccgctccggggtaccgcgcacggcctaccgcggcatcgtgacgtgtttcattcggggccgacgagtataccttgccccgtcgtttgagtggaacaagtacgacccgacctggggatagacttttgatggcactgtttttctttacttttatttctctcaaaacatcagaagcagtaatgtaaatattcattttgtttcagcgctcgtgccaaacatcacgcgcttgttcaagaggctatgcgaagtgatcattgccgttttttttttcctcagcgtaagcggtgcatatgctcaaaatgcatgtgcttgtggaaaatcaaggcaactttgcatctcctgttgagagttctagtccagcaatctatccatggccttttcttctttgggatacttttatcgcgatgctttgcgcttcgtctctaccccttctgtatcctacaaaaatatcataacgccgattatgtgctcgatgcgctgcttcgaatagctctgttttcttcatttaacacgatggtgcggaagaaagggagcctgatcctttgcggcgcgttcctctttgtggcatggaatgccttgctgctgttgttcctttggggccgccccccgatcgggcgcctcggtgagggcgggggcgccgaaccgggcgccggagaagagtggggcgctggaaaatcaaaggtgggcggcgccaatggtctggcaggggaagtatttaaatatcccaatggcgcgccgagcttggctcgagcatggtcatagctgtttcctgtgtgaaattgttatccgctcacaattccacacaacatacgagccggaagcataaagtgtaaagcctggggtgcctaatgagtgagctaactcacattaattgcgttgcgctcactgcccgctttccagtcgggaaacctgtcgtgccagctgcattaatgaatcggccaacgcgcggggagaggcggtttgcgtattgggcgctcttccgcttcctcgctcactgactcgctgcgctcggtcgttcggctgcggcgagcggtatcagctcactcaaaggcggtaatacggttatccacagaatcaggggataacgcaggaaagaacatgtgagcaaaaggccagcaaaaggccaggaaccgtaaaaaggccgcgttgctggcgtttttccataggctccgcccccctgacgagcatcacaaaaatcgacgctcaagtcagaggtggcgaaacccgacaggactataaagataccaggcgtttccccctggaagctccctcgtgcgctctcctgttccgaccctgccgcttaccggatacctgtccgcctttctcccttcgggaagcgtggcgctttctcatagctcacgctgtaggtatctcagttcggtgtaggtcgttcgctccaagctgggctgtgtgcacgaaccccccgttcagcccgaccgctgcgccttatccggtaactatcgtcttgagtccaacccggtaagacacgacttatcgccactggcagcagccactggtaacaggattagcagagcgaggtatgtaggcggtgctacagagttcttgaagtggtggcctaactacggctacactagaagaacagtatttggtatctgcgctctgctgaagccagttaccttcggaaaaagagttggtagctcttgatccggcaaacaaaccaccgctggtagcggtggtttttttgtttgcaagcagcagattacgcgcagaaaaaaaggatctcaagaagatcctttgatcttttctacggggtctgacgctcagtggaacgaaaactcacgttaagggattttggtcatgagattatcaaaaaggatcttcacctagatccttttaaattaaaaatgaagttttaaatcaatctaaagtatatatgagtaaacttggtctgacagttagaaaaactcatcgagcatcaaatgaaactgcaatttattcatatcaggattatcaataccatatttttgaaaaagccgtttctgtaatgaaggagaaaactcaccgaggcagttccataggatggcaagatcctggtatcggtctgcgattccgactcgtccaacatcaatacaacctattaatttcccctcgtcaaaaataaggttatcaagtgagaaatcaccatgagtgacgactgaatccggtgagaatggcaaaagtttatgcatttctttccagacttgttcaacaggccagccattacgctcgtcatcaaaatcactcgcatcaaccaaaccgttattcattcgtgattgcgcctgagcgagacgaaatacgcgatcgctgttaaaaggacaattacaaacaggaatcgaatgcaaccggcgcaggaacactgccagcgcatcaacaatattttcacctgaatcaggatattcttctaatacctggaatgctgttttcccagggatcgcagtggtgagtaaccatgcatcatcaggagtacggataaaatgcttgatggtcggaagaggcataaattccgtcagccagtttagtctgaccatctcatctgtaacatcattggcaacgctacctttgccatgtttcagaaacaactctggcgcatcgggcttcccatacaatcgatagattgtcgcacctgattgcccgacattatcgcgagcccatttatacccatataaatcagcatccatgttggaatttaatcgcggcctagagcaagacgtttcccgttgaatatggctcatactcttcctttttcaatattattgaagcatttatcagggttattgtctcatgagcggatacatatttgaatgtatttagaaaaataaacaaataggggttccgcgcacatttccccgaaaagtgccacctgacgtctaagaaaccattattatcatgacattaacctataaaaataggcgtatcacgaggccctttcgtctcgcgcgtttcggtgatgacggtgaaaacctctgacacatgcagctcccggagacggtcacagcttgtctgtaagcggatgccgggagcagacaagcccgtcagggcgcgtcagcgggtgttggcgggtgtcggggctggcttaactatgcggcatcagagcagattgtactgagagtgcaccatatgcggtgtgaaataccgcacagatgcgtaaggagaaaataccgcatcaggcgccattcgccattcaggctgcgcaactgttgggaagggcgatcggtgcgggcctcttcgctattacgccagctggcgaaagggggatgtgctgcaaggcgattaagttgggtaacgccagggttttcccagtcacgacgttgtaaaacgacggccagtgaattgacgcgtattgggatatttaaat

SEQ ID NO: 268 - DNA, 3927 bp, Artificial Sequence
  pLMTB9072
gtagcgggcctttccgcgtccagtactcctctcgtgattcgttcaaggtgcttgcacggaacctgggggtcatggacgacctgaaatcaggcgttccacgcgccggataccgcggggtcgtgagttttatctcgcgaggccggcgcatttacctggcacccccggagggctggacgaagtacgacgttagctggtcttgaagagggcgtgcctggggagagggagacattggcggcccaggtggtgcgtgtgcgcggatctgcgtgcagaggtgcgcagggcgcgcgctctcgtcttttggtctctttctgttttcgctttatttctgtttttttctccttttcaacagcaagaacagccaccacgcgcaccaagcgaaggtaacgtgagactcggcttgtgggattgcttcggtgcgcggggggggaacggcgaggaggtggggtggtgggtggggacctcccctcatctgcctcctgcgcagcaccccatcactcacgcgcacacagatgagcaagtccgccgacgcactgcaggccacccaactgtgcttcgtgttgctcgtgcatcgatctccctctgtgcaagcgaataggctctcctcagatcagatgtgattttcgttcccctccacatcacttcctcgagcagctgacctttaccatgtcttcgcaggcgatgacggcgcccactaggcctcgccccctccaccgctgttgccaacattgcaactgcttctctgtacttctctgtgtttctcgaactctcttccccctcccccaccgtttccatctccgcgcgtgtgcgcgtcgctgtacactcttcgctggatgccggatcccacgcaaacacacacgcacacacacacacacacatcagacgtgcctcacaaacccgttcgtgctcgaacatcgacagcgcacccagacgtgtggtcttgctcttcttcctttcgctcgttctcagctcttcttcctccttacccagtacgacgagctctgacctcttgtcgtgtgcccgcctgtgtgccatacacctggcacccactcctaaacacgcacttatcacacctccatcgcaacaccatgcgtttccgcatttacaagcgcaaggtcctcattctgacgctcgtcgtggccgcctgcggctttgtgctgtggtccagcaacggtcgccagcgtaaaaacgacgccctggcaccaccgctgctggattcggagcccctgcgaggtgctgggcactttgcggcgtcagtggggatccgccgggtgtcgaatgactcggcatttaaatatcccaatggcgcgccgagcttggctcgagcatggtcatagctgtttcctgtgtgaaattgttatccgctcacaattccacacaacatacgagccggaagcataaagtgtaaagcctggggtgcctaatgagtgagctaactcacattaattgcgttgcgctcactgcccgctttccagtcgggaaacctgtcgtgccagctgcattaatgaatcggccaacgcgcggggagaggcggtttgcgtattgggcgctcttccgcttcctcgctcactgactcgctgcgctcggtcgttcggctgcggcgagcggtatcagctcactcaaaggcggtaatacggttatccacagaatcaggggataacgcaggaaagaacatgtgagcaaaaggccagcaaaaggccaggaaccgtaaaaaggccgcgttgctggcgtttttccataggctccgcccccctgacgagcatcacaaaaatcgacgctcaagtcagaggtggcgaaacccgacaggactataaagataccaggcgtttccccctggaagctccctcgtgcgctctcctgttccgaccctgccgcttaccggatacctgtccgcctttctcccttcgggaagcgtggcgctttctcatagctcacgctgtaggtatctcagttcggtgtaggtcgttcgctccaagctgggctgtgtgcacgaaccccccgttcagcccgaccgctgcgccttatccggtaactatcgtcttgagtccaacccggtaagacacgacttatcgccactggcagcagccactggtaacaggattagcagagcgaggtatgtaggcggtgctacagagttcttgaagtggtggcctaactacggctacactagaagaacagtatttggtatctgcgctctgctgaagccagttaccttcggaaaaagagttggtagctcttgatccggcaaacaaaccaccgctggtagcggtggtttttttgtttgcaagcagcagattacgcgcagaaaaaaaggatctcaagaagatcctttgatcttttctacggggtctgacgctcagtggaacgaaaactcacgttaagggattttggtcatgagattatcaaaaaggatcttcacctagatccttttaaattaaaaatgaagttttaaatcaatctaaagtatatatgagtaaacttggtctgacagttagaaaaactcatcgagcatcaaatgaaactgcaatttattcatatcaggattatcaataccatatttttgaaaaagccgtttctgtaatgaaggagaaaactcaccgaggcagttccataggatggcaagatcctggtatcggtctgcgattccgactcgtccaacatcaatacaacctattaatttcccctcgtcaaaaataaggttatcaagtgagaaatcaccatgagtgacgactgaatccggtgagaatggcaaaagtttatgcatttctttccagacttgttcaacaggccagccattacgctcgtcatcaaaatcactcgcatcaaccaaaccgttattcattcgtgattgcgcctgagcgagacgaaatacgcgatcgctgttaaaaggacaattacaaacaggaatcgaatgcaaccggcgcaggaacactgccagcgcatcaacaatattttcacctgaatcaggatattcttctaatacctggaatgctgttttcccagggatcgcagtggtgagtaaccatgcatcatcaggagtacggataaaatgcttgatggtcggaagaggcataaattccgtcagccagtttagtctgaccatctcatctgtaacatcattggcaacgctacctttgccatgtttcagaaacaactctggcgcatcgggcttcccatacaatcgatagattgtcgcacctgattgcccgacattatcgcgagcccatttatacccatataaatcagcatccatgttggaatttaatcgcggcctagagcaagacgtttcccgttgaatatggctcatactcttcctttttcaatattattgaagcatttatcagggttattgtctcatgagcggatacatatttgaatgtatttagaaaaataaacaaataggggttccgcgcacatttccccgaaaagtgccacctgacgtctaagaaaccattattatcatgacattaacctataaaaataggcgtatcacgaggccctttcgtctcgcgcgtttcggtgatgacggtgaaaacctctgacacatgcagctcccggagacggtcacagcttgtctgtaagcggatgccgggagcagacaagcccgtcagggcgcgtcagcgggtgttggcgggtgtcggggctggcttaactatgcggcatcagagcagattgtactgagagtgcaccatatgcggtgtgaaataccgcacagatgcgtaaggagaaaataccgcatcaggcgccattcgccattcaggctgcgcaactgttgggaagggcgatcggtgcgggcctcttcgctattacgccagctggcgaaagggggatgtgctgcaaggcgattaagttgggtaacgccagggttttcccagtcacgacgttgtaaaacgacggccagtgaattgacgcgtattgggatatttaaat

SEQ ID NO: 269 - DNA, 3971 bp, Artificial Sequence
  pLMTB9080
atgcgtttccgcatttacaagcgcaaggtcctcattctgacgctcgtcgtggccgcctgcggctttgtgctgtggtccagcaacggtcgccagcgtaaaaacgacgccctggcaccaccgctgctggattcggagcccctgcgaggtgctgggcactttgcggcgtcagtggggatccgccgggtgtcgaatgactcggccgctcccctcgtaccggctgtcccccgccccgaggtggacaacctcaccctgcggtatcgctcgttggtttaccagctgaatttcgaccaaatgctgcgaaacgtggacaaggacggaacatggagtccgggtgaactcgtgcttgtggtgcaggttcataaccggccagagtaccttcgcctcttgatcgactcgctccgcaaggctcaaggaattcgggaggtgcttgtgatctttagccatgacttctggtctgcggaaatcaactcactcatttccagcgttgatttctgcccagttctccaggtgttctttccgttcagcatccagctctacccaagcgagtttccgggcagtgacccacgtgactgccctcgcgaccttaagaagaacgcagccctgaagctcgggtgcataaatgcagagtaccctgattccttcgggcactaccgggaagctaaattcagccagacgaagcaccactggtggtggaagcttcacttcgtgtgggagcgcgtgaaggtactccaggactacaccggcctcatcctgttcctcgaggaggatcactacctggcacccgacttttaccacgtgtttaagaaaatgtggaaactgaaacagcaggagtgcccaggctgtgacgtgctgtctcttggcacgtacaccaccatccgtagcttctacggcatcgccgataaagtagacgtcaagacttggaaaagtacagagcacaacatggggttggccctgacacgcgacgcataccagaagcttattgagtgtacagacacattttgcacgtacgacgactacaattgggactggactctgcaatacctcactctggcctgcctgccgaaggtctggaaggtgctggtgccacaggccccccgaatttttcatgccggtgactgcggaatgcatcataagaagacgtgtcgaccctctacccagagcgcccagattgagagcttgttgaataacaacaagcagtacctgtttccggagactctggtgattggcgagaagtttcctatggccgctatttcccccccgcggaagaacggcgggtggggggacatccgtgaccatgagctttgtaagagctaccgccgccttcagtagatttaaatatcccaatggcgcgccgagcttggctcgagcatggtcatagctgtttcctgtgtgaaattgttatccgctcacaattccacacaacatacgagccggaagcataaagtgtaaagcctggggtgcctaatgagtgagctaactcacattaattgcgttgcgctcactgcccgctttccagtcgggaaacctgtcgtgccagctgcattaatgaatcggccaacgcgcggggagaggcggtttgcgtattgggcgctcttccgcttcctcgctcactgactcgctgcgctcggtcgttcggctgcggcgagcggtatcagctcactcaaaggcggtaatacggttatccacagaatcaggggataacgcaggaaagaacatgtgagcaaaaggccagcaaaaggccaggaaccgtaaaaaggccgcgttgctggcgtttttccataggctccgcccccctgacgagcatcacaaaaatcgacgctcaagtcagaggtggcgaaacccgacaggactataaagataccaggcgtttccccctggaagctccctcgtgcgctctcctgttccgaccctgccgcttaccggatacctgtccgcctttctcccttcgggaagcgtggcgctttctcatagctcacgctgtaggtatctcagttcggtgtaggtcgttcgctccaagctgggctgtgtgcacgaaccccccgttcagcccgaccgctgcgccttatccggtaactatcgtcttgagtccaacccggtaagacacgacttatcgccactggcagcagccactggtaacaggattagcagagcgaggtatgtaggcggtgctacagagttcttgaagtggtggcctaactacggctacactagaagaacagtatttggtatctgcgctctgctgaagccagttaccttcggaaaaagagttggtagctcttgatccggcaaacaaaccaccgctggtagcggtggtttttttgtttgcaagcagcagattacgcgcagaaaaaaaggatctcaagaagatcctttgatcttttctacggggtctgacgctcagtggaacgaaaactcacgttaagggattttggtcatgagattatcaaaaaggatcttcacctagatccttttaaattaaaaatgaagttttaaatcaatctaaagtatatatgagtaaacttggtctgacagttagaaaaactcatcgagcatcaaatgaaactgcaatttattcatatcaggattatcaataccatatttttgaaaaagccgtttctgtaatgaaggagaaaactcaccgaggcagttccataggatggcaagatcctggtatcggtctgcgattccgactcgtccaacatcaatacaacctattaatttcccctcgtcaaaaataaggttatcaagtgagaaatcaccatgagtgacgactgaatccggtgagaatggcaaaagtttatgcatttctttccagacttgttcaacaggccagccattacgctcgtcatcaaaatcactcgcatcaaccaaaccgttattcattcgtgattgcgcctgagcgagacgaaatacgcgatcgctgttaaaaggacaattacaaacaggaatcgaatgcaaccggcgcaggaacactgccagcgcatcaacaatattttcacctgaatcaggatattcttctaatacctggaatgctgttttcccagggatcgcagtggtgagtaaccatgcatcatcaggagtacggataaaatgcttgatggtcggaagaggcataaattccgtcagccagtttagtctgaccatctcatctgtaacatcattggcaacgctacctttgccatgtttcagaaacaactctggcgcatcgggcttcccatacaatcgatagattgtcgcacctgattgcccgacattatcgcgagcccatttatacccatataaatcagcatccatgttggaatttaatcgcggcctagagcaagacgtttcccgttgaatatggctcatactcttcctttttcaatattattgaagcatttatcagggttattgtctcatgagcggatacatatttgaatgtatttagaaaaataaacaaataggggttccgcgcacatttccccgaaaagtgccacctgacgtctaagaaaccattattatcatgacattaacctataaaaataggcgtatcacgaggccctttcgtctcgcgcgtttcggtgatgacggtgaaaacctctgacacatgcagctcccggagacggtcacagcttgtctgtaagcggatgccgggagcagacaagcccgtcagggcgcgtcagcgggtgttggcgggtgtcggggctggcttaactatgcggcatcagagcagattgtactgagagtgcaccatatgcggtgtgaaataccgcacagatgcgtaaggagaaaataccgcatcaggcgccattcgccattcaggctgcgcaactgttgggaagggcgatcggtgcgggcctcttcgctattacgccagctggcgaaagggggatgtgctgcaaggcgattaagttgggtaacgccagggttttcccagtcacgacgttgtaaaacgacggccagtgaattgacgcgtattgggatatttaaat

SEQ ID NO: 270 - DNA, 3601 bp, Artificial Sequence
  pLMTB9082
ataagaagacgtgtcgaccctctacccagagcgcccagattgagagcttgttgaataacaacaagcagtacctgtttccggagactctggtgattggcgagaagtttcctatggccgctatttcccccccgcggaagaacggcgggtggggggacatccgtgaccatgagctttgtaagagctaccgccgccttcagtagggcacgcagtgtgtgtctcgtttgctccgaattctttttcctttttcgtttttcgtgtttcgcgtgcctctcttttcggcgcatgcgaaaaacagcacagcaatccagcaaacgaacaaagaaaatcatcgatggcgcacgctacgccaaggttgggggtggagcgggggtggcggcaacgccgtgtgcagcagagcagacacccatcgcagaagcccccggtatctgcgtgcatgtgtgttcggtgcacgaccgggtcgtgctgcttgtatgtttggggagggaggggctgcgttgccttcctcacgcctcccatccctccatccctgtcgccttctaggggtcgccgaggcgcgtgcagagacggactctacaggcccaggcgagatggcaacgggcgcacgcacacacgcacgcggagggaggaatgtttgggatgaatcacactgcactgaaacctctcttctaccctcatcagccttcatcttcactcgacacacagacgcgccgctgtcgccaccgcctcagaaaaggcagcaagcacacgtgaaaccctaaaatgcggtttcgtatttacaagcggaaggtgcttattctgacactggtggtggctgcctgcgggttcgttctgtggtcatcgaacggccggcagcggaagaacgacgcgctggctccaccactgctggactcggagccgctccggggtgccggccacttcgcagctagcgtcggaatccgtcgcgttagcaacgactccgcatttaaatatcccaatggcgcgccgagcttggctcgagcatggtcatagctgtttcctgtgtgaaattgttatccgctcacaattccacacaacatacgagccggaagcataaagtgtaaagcctggggtgcctaatgagtgagctaactcacattaattgcgttgcgctcactgcccgctttccagtcgggaaacctgtcgtgccagctgcattaatgaatcggccaacgcgcggggagaggcggtttgcgtattgggcgctcttccgcttcctcgctcactgactcgctgcgctcggtcgttcggctgcggcgagcggtatcagctcactcaaaggcggtaatacggttatccacagaatcaggggataacgcaggaaagaacatgtgagcaaaaggccagcaaaaggccaggaaccgtaaaaaggccgcgttgctggcgtttttccataggctccgcccccctgacgagcatcacaaaaatcgacgctcaagtcagaggtggcgaaacccgacaggactataaagataccaggcgtttccccctggaagctccctcgtgcgctctcctgttccgaccctgccgcttaccggatacctgtccgcctttctcccttcgggaagcgtggcgctttctcatagctcacgctgtaggtatctcagttcggtgtaggtcgttcgctccaagctgggctgtgtgcacgaaccccccgttcagcccgaccgctgcgccttatccggtaactatcgtcttgagtccaacccggtaagacacgacttatcgccactggcagcagccactggtaacaggattagcagagcgaggtatgtaggcggtgctacagagttcttgaagtggtggcctaactacggctacactagaagaacagtatttggtatctgcgctctgctgaagccagttaccttcggaaaaagagttggtagctcttgatccggcaaacaaaccaccgctggtagcggtggtttttttgtttgcaagcagcagattacgcgcagaaaaaaaggatctcaagaagatcctttgatcttttctacggggtctgacgctcagtggaacgaaaactcacgttaagggattttggtcatgagattatcaaaaaggatcttcacctagatccttttaaattaaaaatgaagttttaaatcaatctaaagtatatatgagtaaacttggtctgacagttagaaaaactcatcgagcatcaaatgaaactgcaatttattcatatcaggattatcaataccatatttttgaaaaagccgtttctgtaatgaaggagaaaactcaccgaggcagttccataggatggcaagatcctggtatcggtctgcgattccgactcgtccaacatcaatacaacctattaatttcccctcgtcaaaaataaggttatcaagtgagaaatcaccatgagtgacgactgaatccggtgagaatggcaaaagtttatgcatttctttccagacttgttcaacaggccagccattacgctcgtcatcaaaatcactcgcatcaaccaaaccgttattcattcgtgattgcgcctgagcgagacgaaatacgcgatcgctgttaaaaggacaattacaaacaggaatcgaatgcaaccggcgcaggaacactgccagcgcatcaacaatattttcacctgaatcaggatattcttctaatacctggaatgctgttttcccagggatcgcagtggtgagtaaccatgcatcatcaggagtacggataaaatgcttgatggtcggaagaggcataaattccgtcagccagtttagtctgaccatctcatctgtaacatcattggcaacgctacctttgccatgtttcagaaacaactctggcgcatcgggcttcccatacaatcgatagattgtcgcacctgattgcccgacattatcgcgagcccatttatacccatataaatcagcatccatgttggaatttaatcgcggcctagagcaagacgtttcccgttgaatatggctcatactcttcctttttcaatattattgaagcatttatcagggttattgtctcatgagcggatacatatttgaatgtatttagaaaaataaacaaataggggttccgcgcacatttccccgaaaagtgccacctgacgtctaagaaaccattattatcatgacattaacctataaaaataggcgtatcacgaggccctttcgtctcgcgcgtttcggtgatgacggtgaaaacctctgacacatgcagctcccggagacggtcacagcttgtctgtaagcggatgccgggagcagacaagcccgtcagggcgcgtcagcgggtgttggcgggtgtcggggctggcttaactatgcggcatcagagcagattgtactgagagtgcaccatatgcggtgtgaaataccgcacagatgcgtaaggagaaaataccgcatcaggcgccattcgccattcaggctgcgcaactgttgggaagggcgatcggtgcgggcctcttcgctattacgccagctggcgaaagggggatgtgctgcaaggcgattaagttgggtaacgccagggttttcccagtcacgacgttgtaaaacgacggccagtgaattgacgcgtattgggatatttaaat

SEQ ID NO: 271 - DNA, 4171 bp, Artificial Sequence
  pLMTB9083
atgcggtttcgtatttacaagcggaaggtgcttattctgacactggtggtggctgcctgcgggttcgttctgtggtcatcgaacggccggcagcggaagaacgacgcgctggctccaccactgctggactcggagccgctccggggtgccggccacttcgcagctagcgtcggaatccgtcgcgttagcaacgactccgctgccccgttggtacctgcagtcccgcgccctgaggtagacaacctgaccctgcgctatcgcagccttgtttaccagttgaacttcgatcagatgttgcgcaacgttgacaaggacgggacttggtcgcccggtgagcttgtgctcgtggtgcaagtgcacaaccgccccgagtacctgcgcctgctgatcgacagcctccggaaggcccagggtatccgcgaagttttggtcattttctcgcacgacttctggtcggcggagattaactcgctgataagcagtgtcgacttttgcccggtcttgcaggtattcttcccttttagcatccaactttacccatccgagttcccgggaagcgatcctcgggactgcccacgcgaccttaagaagaacgccgcgctcaagctgggttgcatcaatgcggagtaccccgactcgttcggtcactaccgggaagcgaagttcagtcagactaagcatcactggtggtggaaactgcacttcgtatgggagcgggtaaaggtgctgcaagactacaccggtctgatcctgtttctggaggaggaccactacctggccccggatttctaccacgtgttcaaaaagatgtggaagctgaaacagcaggagtgtcccggctgcgacgtcctgagtctggggacgtacacgacaatacgctctttctacggtatcgcagataaagtggatgttaagacttggaaatcaactgagcacaatatgggcctggcactcactcgggatgcttaccaaaagctcatcgagtgcacagatactttctgtacctacgatgactacaactgggactggactcttcagtacctgactctcgcatgcctgcctaaggtctggaaagtgctcgtgccgcaggcaccgcgaatttttcacgccggtgattgcggcatgcaccacaagaagacttgccgcccgagtacacaaagcgcgcagatagagtccctcctgaacaacaacaagcagtacctgttccccgagactctggtgattggggagaagtttcctatggccgccatctctccacctcgcaaaaacggtggatggggcgacatccgtgaccatgagctctgtaagtcgtaccggcgactccagtgagacgtgcacgcagtcctgtccccacccccgacagcaggagtgcgggactgggtgctctaacaagcgcatggtacgagctatgtgctggtgtgtagccagcggggctgtcatgccatgtcgatctctccccgtgagcagccccccaaaaagacaacctgatttctccctttttccgatatttctccctttgtgctaaggggatttaaatatcccaatggcgcgccgagcttggctcgagcatggtcatagctgtttcctgtgtgaaattgttatccgctcacaattccacacaacatacgagccggaagcataaagtgtaaagcctggggtgcctaatgagtgagctaactcacattaattgcgttgcgctcactgcccgctttccagtcgggaaacctgtcgtgccagctgcattaatgaatcggccaacgcgcggggagaggcggtttgcgtattgggcgctcttccgcttcctcgctcactgactcgctgcgctcggtcgttcggctgcggcgagcggtatcagctcactcaaaggcggtaatacggttatccacagaatcaggggataacgcaggaaagaacatgtgagcaaaaggccagcaaaaggccaggaaccgtaaaaaggccgcgttgctggcgtttttccataggctccgcccccctgacgagcatcacaaaaatcgacgctcaagtcagaggtggcgaaacccgacaggactataaagataccaggcgtttccccctggaagctccctcgtgcgctctcctgttccgaccctgccgcttaccggatacctgtccgcctttctcccttcgggaagcgtggcgctttctcatagctcacgctgtaggtatctcagttcggtgtaggtcgttcgctccaagctgggctgtgtgcacgaaccccccgttcagcccgaccgctgcgccttatccggtaactatcgtcttgagtccaacccggtaagacacgacttatcgccactggcagcagccactggtaacaggattagcagagcgaggtatgtaggcggtgctacagagttcttgaagtggtggcctaactacggctacactagaagaacagtatttggtatctgcgctctgctgaagccagttaccttcggaaaaagagttggtagctcttgatccggcaaacaaaccaccgctggtagcggtggtttttttgtttgcaagcagcagattacgcgcagaaaaaaaggatctcaagaagatcctttgatcttttctacggggtctgacgctcagtggaacgaaaactcacgttaagggattttggtcatgagattatcaaaaaggatcttcacctagatccttttaaattaaaaatgaagttttaaatcaatctaaagtatatatgagtaaacttggtctgacagttagaaaaactcatcgagcatcaaatgaaactgcaatttattcatatcaggattatcaataccatatttttgaaaaagccgtttctgtaatgaaggagaaaactcaccgaggcagttccataggatggcaagatcctggtatcggtctgcgattccgactcgtccaacatcaatacaacctattaatttcccctcgtcaaaaataaggttatcaagtgagaaatcaccatgagtgacgactgaatccggtgagaatggcaaaagtttatgcatttctttccagacttgttcaacaggccagccattacgctcgtcatcaaaatcactcgcatcaaccaaaccgttattcattcgtgattgcgcctgagcgagacgaaatacgcgatcgctgttaaaaggacaattacaaacaggaatcgaatgcaaccggcgcaggaacactgccagcgcatcaacaatattttcacctgaatcaggatattcttctaatacctggaatgctgttttcccagggatcgcagtggtgagtaaccatgcatcatcaggagtacggataaaatgcttgatggtcggaagaggcataaattccgtcagccagtttagtctgaccatctcatctgtaacatcattggcaacgctacctttgccatgtttcagaaacaactctggcgcatcgggcttcccatacaatcgatagattgtcgcacctgattgcccgacattatcgcgagcccatttatacccatataaatcagcatccatgttggaatttaatcgcggcctagagcaagacgtttcccgttgaatatggctcatactcttcctttttcaatattattgaagcatttatcagggttattgtctcatgagcggatacatatttgaatgtatttagaaaaataaacaaataggggttccgcgcacatttccccgaaaagtgccacctgacgtctaagaaaccattattatcatgacattaacctataaaaataggcgtatcacgaggccctttcgtctcgcgcgtttcggtgatgacggtgaaaacctctgacacatgcagctcccggagacggtcacagcttgtctgtaagcggatgccgggagcagacaagcccgtcagggcgcgtcagcgggtgttggcgggtgtcggggctggcttaactatgcggcatcagagcagattgtactgagagtgcaccatatgcggtgtgaaataccgcacagatgcgtaaggagaaaataccgcatcaggcgccattcgccattcaggctgcgcaactgttgggaagggcgatcggtgcgggcctcttcgctattacgccagctggcgaaagggggatgtgctgcaaggcgattaagttgggtaacgccagggttttcccagtcacgacgttgtaaaacgacggccagtgaattgacgcgtattgggatatttaaat

SEQ ID NO: 272 - DNA, 3899 bp, Artificial Sequence
  pLMTB9131
ggaacggtgatttctccgtgaacgaatacgagactctgtttggcaaagtcgccgcatgtaacattcgtaaaggcgcgcagatcaagaaaactgatatcgagggtggttcgggcggttatccttacgacgtcccggattacgcgtacccttacgacgtcccggactacgcatacccttacgacgtccctgattacgcctaagacgtgcacgcagtcctgtccccacccccgacagcaggagtgcgggactgggtgctctaacaagcgcatggtacgagctatgtgctggtgtgtagccagcggggctgtcatgccatgtcgatctctccccgtgagcagccccccaaaaagacaacctgatttctccctttttccgatatttctccctttgtgctaaggggacccttcagcagctcccagcgccgcacatgcacacactggcgcgtgcttccgaggtcctcggtgcacatattttctattatctcacacacccggttgcagggcggctcaatgtcacggcgcgcgcacgcactgccttgagtacggaacggcgagcgatacgaccgagacggcgctgccagtagggtgtaggacgctgcgcatctcatgaatgtatgaagcatgcagccaaccacacaaacatatgggcgcacgagtcttccctcacagacagcgcggctggtgaggcggcagaaggtcggccgcggaagggcacacactacgtttcacgcgtacatgaccccgtccgctttccgcgctattttaggcgcacacccgttcaccagcctctccgatcctgcttccactcctcctccgcctccgccctccctctccccgtcatgacgccgcacgcaccgcgatcgcacacaagctctctctctctctcaacacaaccgaaccaacatccctcaccccctctcttaccacaaaatgattgcatcaagtgtccgtcacgcagtcatcttgctgttggtcgccgtagcgatgatggtcaacaacgtgatcgcccccgaggctagctttcaggtctggaataaagacagttcatcgaaaaatctcatcccccgacttcagaagatctggaagaactacctgagcatgaataagtacaaggttagctacaagggaccgggcccgggtatcaaattctctgccgaggcccttcgctgccatctgcgcgaccatgtgaatgtgagcatggtggaggtgaccgacttcccttttaacacgtccgagtgggaggggtatctgccaaaggatttaaatatcccaatggcgcgccgagcttggctcgagcatggtcatagctgtttcctgtgtgaaattgttatccgctcacaattccacacaacatacgagccggaagcataaagtgtaaagcctggggtgcctaatgagtgagctaactcacattaattgcgttgcgctcactgcccgctttccagtcgggaaacctgtcgtgccagctgcattaatgaatcggccaacgcgcggggagaggcggtttgcgtattgggcgctcttccgcttcctcgctcactgactcgctgcgctcggtcgttcggctgcggcgagcggtatcagctcactcaaaggcggtaatacggttatccacagaatcaggggataacgcaggaaagaacatgtgagcaaaaggccagcaaaaggccaggaaccgtaaaaaggccgcgttgctggcgtttttccataggctccgcccccctgacgagcatcacaaaaatcgacgctcaagtcagaggtggcgaaacccgacaggactataaagataccaggcgtttccccctggaagctccctcgtgcgctctcctgttccgaccctgccgcttaccggatacctgtccgcctttctcccttcgggaagcgtggcgctttctcatagctcacgctgtaggtatctcagttcggtgtaggtcgttcgctccaagctgggctgtgtgcacgaaccccccgttcagcccgaccgctgcgccttatccggtaactatcgtcttgagtccaacccggtaagacacgacttatcgccactggcagcagccactggtaacaggattagcagagcgaggtatgtaggcggtgctacagagttcttgaagtggtggcctaactacggctacactagaagaacagtatttggtatctgcgctctgctgaagccagttaccttcggaaaaagagttggtagctcttgatccggcaaacaaaccaccgctggtagcggtggtttttttgtttgcaagcagcagattacgcgcagaaaaaaaggatctcaagaagatcctttgatcttttctacggggtctgacgctcagtggaacgaaaactcacgttaagggattttggtcatgagattatcaaaaaggatcttcacctagatccttttaaattaaaaatgaagttttaaatcaatctaaagtatatatgagtaaacttggtctgacagttagaaaaactcatcgagcatcaaatgaaactgcaatttattcatatcaggattatcaataccatatttttgaaaaagccgtttctgtaatgaaggagaaaactcaccgaggcagttccataggatggcaagatcctggtatcggtctgcgattccgactcgtccaacatcaatacaacctattaatttcccctcgtcaaaaataaggttatcaagtgagaaatcaccatgagtgacgactgaatccggtgagaatggcaaaagtttatgcatttctttccagacttgttcaacaggccagccattacgctcgtcatcaaaatcactcgcatcaaccaaaccgttattcattcgtgattgcgcctgagcgagacgaaatacgcgatcgctgttaaaaggacaattacaaacaggaatcgaatgcaaccggcgcaggaacactgccagcgcatcaacaatattttcacctgaatcaggatattcttctaatacctggaatgctgttttcccagggatcgcagtggtgagtaaccatgcatcatcaggagtacggataaaatgcttgatggtcggaagaggcataaattccgtcagccagtttagtctgaccatctcatctgtaacatcattggcaacgctacctttgccatgtttcagaaacaactctggcgcatcgggcttcccatacaatcgatagattgtcgcacctgattgcccgacattatcgcgagcccatttatacccatataaatcagcatccatgttggaatttaatcgcggcctagagcaagacgtttcccgttgaatatggctcatactcttcctttttcaatattattgaagcatttatcagggttattgtctcatgagcggatacatatttgaatgtatttagaaaaataaacaaataggggttccgcgcacatttccccgaaaagtgccacctgacgtctaagaaaccattattatcatgacattaacctataaaaataggcgtatcacgaggccctttcgtctcgcgcgtttcggtgatgacggtgaaaacctctgacacatgcagctcccggagacggtcacagcttgtctgtaagcggatgccgggagcagacaagcccgtcagggcgcgtcagcgggtgttggcgggtgtcggggctggcttaactatgcggcatcagagcagattgtactgagagtgcaccatatgcggtgtgaaataccgcacagatgcgtaaggagaaaataccgcatcaggcgccattcgccattcaggctgcgcaactgttgggaagggcgatcggtgcgggcctcttcgctattacgccagctggcgaaagggggatgtgctgcaaggcgattaagttgggtaacgccagggttttcccagtcacgacgttgtaaaacgacggccagtgaattgacgcgtattgggatatttaaat

SEQ ID NO: 273 - DNA, 4735 bp, Artificial Sequence
  pLMTB9132
cccgaggctagctttcaggtctggaataaagacagttcatcgaaaaatctcatcccccgacttcagaagatctggaagaactacctgagcatgaataagtacaaggttagctacaagggaccgggcccgggtatcaaattctctgccgaggcccttcgctgccatctgcgcgaccatgtgaatgtgagcatggtggaggtgaccgacttcccttttaacacgtccgagtgggaggggtatctgccaaaggagtcgatccgaaccaaggcagggccgtggggccgctgcgcggtggtgagttccgccggctcgctcaagagttcacagctcggtcgtgagatcgatgaccacgacgcagtactgcggtttaatggcgccccgaccgcgaatttccagcaggacgtgggtacgaagacaacaatccgtcttatgaattcgcagctcgtgacgactgagaagcgttttcttaaagactcgttgtacaatgaaggtatccttatcgtgtgggacccaagcgtgtatcattccgatattcctaaatggtaccagaacccggactataacttcttcaacaactacaagacgtaccgcaagctccacccgaaccagcccttctacatccttaagccacagatgccttgggagctgtgggatattctccaggagatatccccggaggaaatccagccaaatcccccatcttccggcatgctcggtattatcattatgatgacgctgtgcgaccaggtggacatatacgagttcctgccatccaagcgcaagaccgacgtctgctactactaccagaagttcttcgatagcgcctgtacaatgggcgcataccaccccctgctctatgaaaagaacctggtaaaacacctcaaccagggcactgacgaggacatctatctgctgggcaaggctacactgccgggctttcgcactatacactgctagagagcaattgagcgcgtgcgtgtcggtgttcgggtgtgtttatggtcactgaggagggaggagagaaatgcagggcttcctcctcgtgtgttgctctctgtttcgttctcccttccccgtagcctgctgccgcactctgctcgtcccgtgcgtccagacctctgtagcctttcgattcctttatcttttttgttttaattttcttttttgtccgtatgcttcccagaaacgaaaaaaagaacaagaaaggacgaagtacaagtggatgtgcgccgagagcacgtctgcccccctgtgaaggagcgcagcggatgcgtgctccgctccactcggtcatctctgccgtccctcaggcacggcaggcccaggagagttcaaggagcttgatgctgcattgcaaggcgaatgcgttttttttttcgttcgccctccgccagcggtgctcatgaactgcgatgcactcgagttcccgaaagagcagcgagccactgtttcttcgtcgagagtatcgctgaggcacggcgtgcttgcgattgctcgctctgcaagtgcgcgtgcatggcggctctctttgcagtgctcctctacttttctccctctgttctgcgctgccatgcctccttgtatgcctcggcccacgatcactcacgcctgcgcacaaacgcatactttctttttccactcgttctccacggtgcgccttgattcgcactcgtccaatgactagggcgtgtggagagaagagaaggtacagatagcgccaggaggcggctgagcagggagacacacgctggcacacgtcaacgtatagcgcacacccacgtcccacttctgtacggctgctctcttcctactagttggccatattcagcccttcgttctgcccatagtcccagttatcgaagtgacgctgcatgatatagctgcgagcacacaatggagaaacagaacatcgcggtcatcctcgcgcggcagaactccaaggggctgccactcaagaacctgcgtaagatgaacggaatcagtctcctcggccacacgatcaatgcggcgatctcgtctaagtgcttcgaccgcatcattgtgtctacggacggagggcttattgcggaggaggctaagaacttcggggttgaatttaaatatcccaatggcgcgccgagcttggctcgagcatggtcatagctgtttcctgtgtgaaattgttatccgctcacaattccacacaacatacgagccggaagcataaagtgtaaagcctggggtgcctaatgagtgagctaactcacattaattgcgttgcgctcactgcccgctttccagtcgggaaacctgtcgtgccagctgcattaatgaatcggccaacgcgcggggagaggcggtttgcgtattgggcgctcttccgcttcctcgctcactgactcgctgcgctcggtcgttcggctgcggcgagcggtatcagctcactcaaaggcggtaatacggttatccacagaatcaggggataacgcaggaaagaacatgtgagcaaaaggccagcaaaaggccaggaaccgtaaaaaggccgcgttgctggcgtttttccataggctccgcccccctgacgagcatcacaaaaatcgacgctcaagtcagaggtggcgaaacccgacaggactataaagataccaggcgtttccccctggaagctccctcgtgcgctctcctgttccgaccctgccgcttaccggatacctgtccgcctttctcccttcgggaagcgtggcgctttctcatagctcacgctgtaggtatctcagttcggtgtaggtcgttcgctccaagctgggctgtgtgcacgaaccccccgttcagcccgaccgctgcgccttatccggtaactatcgtcttgagtccaacccggtaagacacgacttatcgccactggcagcagccactggtaacaggattagcagagcgaggtatgtaggcggtgctacagagttcttgaagtggtggcctaactacggctacactagaagaacagtatttggtatctgcgctctgctgaagccagttaccttcggaaaaagagttggtagctcttgatccggcaaacaaaccaccgctggtagcggtggtttttttgtttgcaagcagcagattacgcgcagaaaaaaaggatctcaagaagatcctttgatcttttctacggggtctgacgctcagtggaacgaaaactcacgttaagggattttggtcatgagattatcaaaaaggatcttcacctagatccttttaaattaaaaatgaagttttaaatcaatctaaagtatatatgagtaaacttggtctgacagttagaaaaactcatcgagcatcaaatgaaactgcaatttattcatatcaggattatcaataccatatttttgaaaaagccgtttctgtaatgaaggagaaaactcaccgaggcagttccataggatggcaagatcctggtatcggtctgcgattccgactcgtccaacatcaatacaacctattaatttcccctcgtcaaaaataaggttatcaagtgagaaatcaccatgagtgacgactgaatccggtgagaatggcaaaagtttatgcatttctttccagacttgttcaacaggccagccattacgctcgtcatcaaaatcactcgcatcaaccaaaccgttattcattcgtgattgcgcctgagcgagacgaaatacgcgatcgctgttaaaaggacaattacaaacaggaatcgaatgcaaccggcgcaggaacactgccagcgcatcaacaatattttcacctgaatcaggatattcttctaatacctggaatgctgttttcccagggatcgcagtggtgagtaaccatgcatcatcaggagtacggataaaatgcttgatggtcggaagaggcataaattccgtcagccagtttagtctgaccatctcatctgtaacatcattggcaacgctacctttgccatgtttcagaaacaactctggcgcatcgggcttcccatacaatcgatagattgtcgcacctgattgcccgacattatcgcgagcccatttatacccatataaatcagcatccatgttggaatttaatcgcggcctagagcaagacgtttcccgttgaatatggctcatactcttcctttttcaatattattgaagcatttatcagggttattgtctcatgagcggatacatatttgaatgtatttagaaaaataaacaaataggggttccgcgcacatttccccgaaaagtgccacctgacgtctaagaaaccattattatcatgacattaacctataaaaataggcgtatcacgaggccctttcgtctcgcgcgtttcggtgatgacggtgaaaacctctgacacatgcagctcccggagacggtcacagcttgtctgtaagcggatgccgggagcagacaagcccgtcagggcgcgtcagcgggtgttggcgggtgtcggggctggcttaactatgcggcatcagagcagattgtactgagagtgcaccatatgcggtgtgaaataccgcacagatgcgtaaggagaaaataccgcatcaggcgccattcgccattcaggctgcgcaactgttgggaagggcgatcggtgcgggcctcttcgctattacgccagctggcgaaagggggatgtgctgcaaggcgattaagttgggtaacgccagggttttcccagtcacgacgttgtaaaacgacggccagtgaattgacgcgtattgggatatttaaat

SEQ ID NO: 274 - DNA, 8214 bp, Artificial Sequence
  pLMTB9205
tcgcgcgtttcggtgatgacggtgaaaacctctgacacatgcagctcccggagacggtcacagcttgtctgtaagcggatgccgggagcagacaagcccgtcagggcgcgtcagcgggtgttggcgggtgtcggggctggcttaactatgcggcatcagagcagattgtactgagagtgcaccatatgcggtgtgaaataccgcacagatgcgtaaggagaaaataccgcatcaggcgccattcgccattcaggctgcgcaactgttgggaagggcgatcggtgcgggcctcttcgctattacgccagctggcgaaagggggatgtgctgcaaggcgattaagttgggtaacgccagggttttcccagtcacgacgttgtaaaacgacggccagtgaattgacgcgtattgggatatttaaattggataacttggcgaaacgccaagctaatacatgaaccaaccgggtgttctccactccagacggtgggcaaccatcgtcgtgagacgcccagcgaatgaatgacagtaaaaccaatgccttcactggcagtaacacccagcagtgttgactcaattcattccgtgcgaaagccggcttgttccggcgtcttttgacgaacaactgccctatcagctggtgatggccgtgtagtggactgccatgcatggcgttgacgggagcgggggattagggttcgattccggagagggagcctgagaaatagctaccacttctacggagggcagcaggcgcgcaaattgcccaatgtcaaaacaaaacgatgaggcagcgaaaagaaatagagttgtcagtccatttggattgtcatttcaatgggggatatttaaacccatccaatatcgagtaacaattggaggacaagtctggtgccagcacccgcggtaattccagctccaaaagcgtatattaatgctgttgctgttaaagggttcgtagttgaactgtgggctgtgcaggtttgttcctggtcgtcccgtccatgtcggatttggtgacccaggcccttgcagcccgtgaacattcaaagaaacaagaaacacgggagtggttcctttcctgatttacgcatgtcatgcatgcgtcgaagatccagtcgcagcctgaccgcatcacacatcaaggcgttacagcctctccgtctttgctgcacccaagtgtattcgtgtgaccgcgttgagggatctaatggattcggaactttggtcgtttggtctctcatgctgcccaatcccatgcgcttttctccgtgcctctctgtctccccttccgttctatttggacaacgatgtgtactgtaatgcgtgcgccatctgacaacgaatagatcagcagcattcgcacacttgcacatacccagtgaagcttttgtgtctgtcgtattgacaacaccgactgcaacaaggtgtagatagaagttggccttctcgctcgctcgcacgctcttcacgctcctgctttccttgctgtgccttgccaccagatctaccatggccgcgccacgcgataacgtcaccctgcttttcaagttgtactgcctggcggtgatgactctgatggcagcggtgtacaccattgccctgcgctatacgcgtacctcggacaaggagctgtatttcagcacaacggccgtgtgcattacagaggtgattaagcttttgctgtcagtcgggatcttggcaaaggagacaggctctttgggtcgcttcaaggcatccctccgcgagaatgtgctgggatctccgaaagagctgctcaagctgtctgtgccgtcactggtctacgcagtgcagaataatatggctttcctcgccctgagcaatttggacgcagcggtctaccaagtgacataccagctcaagatcccttgcacggccctttgcacagtactcatgctgaaccgcacgctgtctaagcttcagtgggtatcggtgtttatgctctgcgctggcgtgacactggtgcaatggaagccggcccaggcaacaaaggtggttgtggagcagaaccctttgctcggcttcggtgccatcgctatcgcggtgctgtgctcgggctttgcaggcgtgtactttgaaaaggtgttgaagtcgtcagatacctctctgtgggtacgcaacatccaaatgtacctgtcgggtattatcgtgacactggcgggtgtctacctgtccgacggagccgagatcaaggagaaggggttcttctacggttacacttactacgtttggttcgtgatcttcctcgcatcagtcggtggactgtacacatcggtggttgtcaagtataccgacaacataatgaagggattctcggcagcagcggcgatcgtgctgagtaccattgcatccgtgatgctgtttggactgcagattacgctgaccttcgccttggggactctccttgtgtgtgtgtcgatctacctgtacgggctgccacgccaagacacaactagcatccaacaaggagaaacggcctccaaggagcgcgtgatcggtgtgtaagcggccgccctcctcctcctttcttgttcctttcacgtcgccttctcggttgtagctggcagacgacgagtcttacttttacgtgtacttctctatagatgatgtatgatctctctgcatgcgtgttcgtgcatgtgtccgtgtgttgtgtacgcgtgcgtctcgcctcagctctccgcgtgaaagggtttgactgcccatgatgcgtgtgtatatccacgcgcaggcacgcacacacacacacacacacacacacacaggcacacacaggcacacaaacgcatctcaggccgagccgcatacgtctctcgcacggtctcgtttatttgatcatgtagttgagtattaaattgggaagacaaaaacataatagcacgaagagtcgggcacgaaaagcccgatctctctctctctctctcgtgcgcgcaggggcgtgtgggtgcacgacgacgaggacggaggggggaagggaggcataaacggatcgatcccccatcgcacatgcgggtacgagcattatctgctgtgtctggtcctttatcatatcgctacccgcccgccccccgcccccctcccccccccccccccgcggctcctgtcactgtcgttcctgcgactccccacacacccgcgcaacgctcatgtcacgaagagaaaagtagaaggcgtggcgatgcgttgcgcggccccctgtccgctggcatgcagacgtcgagccgtggaacggatggtagcgagagacaacgcggcgatgcaggaaaggagatttactgcaggacgtctacacacgcgcgcacaccactgcgaatggcaccgtgctgaggaaaattgggggggagggcgcacgggggcggggcaggaaacggttggatcagcagcactctcaacttgtgtccgtattgcgaaggagggagaggagcctgcccgtattatgggcgctgaaacgtcggaaccacctatgaatcccacttctgcgtcgcggaggcgtactgcttccgaccacctccgcagctcacgcgcgtcgagctccctccctttccccttctttccgttgtgtgtgtgtgtgtgtgtgtgtcttgtcacgatgcatggccatctctcctccaaccctccacgccttcctctcccccgcccatcaaacgcgctacggccacaaccatttcttcaagtatcacatccaccaccactcttacccacctaccctcttcgactctgacacagccactgacgccctctccgcctctctcgctcgctgcacattgactctccacagccccccctccctcgcacagccagccccacccacccacccacccacccaccgctctacacacctccacagcagccggatccaccgcatggccaagttgaccagtgccgttccggtgctcaccgcgcgcgacgtcgccggagcggtcgagttctggaccgaccggctcgggttctcccgggacttcgtggaggacgacttcgccggtgtggtccgggacgacgtgaccctgttcatcagcgcggtccaggaccaggtggtgccggacaacaccctggcctgggtgtgggtgcgcggcctggacgagctgtacgccgagtggtcggaggtcgtgtccacgaacttccgggacgcctccgggccggccatgaccgagatcggcgagcagccgtgggggcgggagttcgccctgcgcgacccggccggcaactgcgtgcacttcgtggccgaggagcaggactgaccgactagttctagttctaggggccgaattcagatcctcgtgtgagcgttcgcggaatcggtcgctcgtgtttatgcccgtcttggtgttgtgctcgcaaggcggtgcagcaggataccgtcgccctcctctctccttgcttctctgttcttcaattcgcgatctcacagaggccggctgtgcacgcccttcctcaccctccttttcccacctctcggccaccggtcggctccgttccgtctgccgtcgagaagggacgggcatgtgcagctcctccctttctctcgcgcgcgcatcttctcttgcttgtggcactcacgctcatgcgtcaaggcggccccacgccgagcccctgcgctcccttccctcttgcgcatccgtagcgcggatgccgtcgatgcgcaaggccggcatgaaggagcgcgtgccctcaagagggcacactatcatgccctacgtgggccacgcagcgatgaggccggcttcggcggagatgcgtcacgcacgtgccagatgatgcgctacgccttccttgacttgcgcccccctctcttcctccgtctctcactctctctctctcacacacacacacacacacacacacacacaaagctccggttcgtccggccgtaacgccttttcaactcacggcctctaggaatgaaggagggtagttcgggggagaacgtactggggcgtcagaggtgaaattcttagaccgcaccaagacgaactacagcgaaggcattcttcaaggataccttcctcaatcaagaaccaaagtgtggagatcgaagatgattagagaccattgtagtccacactgcaaacgatgacacccatgaattggggatcttatgggccggcctgcggcagggtttaccctgtgtcagcaccgcgcccgcttttaccaacttacgtatcttttctattcggcctttaccggccacccacgggaatatcctcagcacgttttctgttttttcacgcgaaagctttgaggttacagtctcaggggggagtacgttcgcaagagtgaaacttaaagaaattgacggaatggcaccacaagacgtggagcgtgcggtttaatttgactcaacacggggaactttaccagatccggacaggatgaggattgacagattgagtgttctttctcgattccctgaatggtggtgcatggccgcttttggtcggtggagtgatttgtttggttgattccgtcaacggacgagatccaagctgcccagtagaattcagaattgcccatagaatagcaaactcatcggcgggttttacccaacggtgggccgcattcggtcgaattcttctctgcgggattcctttgtaattgcacaaggtgaaattttgggcaacagcaggtctgtgatgctcctcaatgttctgggcgacacgcgcactacaatgtcagtgagaacaagaaaaacgacttttgtcgaacctacttgatcaaaagagtggggaaaccccggaatcacatagacccacttgggaccgaggattgcaattattggtcgcgcaacgaggaatgtctcgtaggcgcagctcatcaaactgtgccgattacgtccctgccatttgtacacaccgcccgtcgttgtttccgatgatggtgcaatacaggtgatcggacaggcggtgttttatccgcccgaaagttcaccgatatttaaatatcccaatggcgcgccgagcttggcgtaatcatggtcatagctgtttcctgtgtgaaattgttatccgctcacaattccacacaacatacgagccggaagcataaagtgtaaagcctggggtgcctaatgagtgagctaactcacattaattgcgttgcgctcactgcccgctttccagtcgggaaacctgtcgtgccagctgcattaatgaatcggccaacgcgcggggagaggcggtttgcgtattgggcgctcttccgcttcctcgctcactgactcgctgcgctcggtcgttcggctgcggcgagcggtatcagctcactcaaaggcggtaatacggttatccacagaatcaggggataacgcaggaaagaacatgtgagcaaaaggccagcaaaaggccaggaaccgtaaaaaggccgcgttgctggcgtttttccataggctccgcccccctgacgagcatcacaaaaatcgacgctcaagtcagaggtggcgaaacccgacaggactataaagataccaggcgtttccccctggaagctccctcgtgcgctctcctgttccgaccctgccgcttaccggatacctgtccgcctttctcccttcgggaagcgtggcgctttctcatagctcacgctgtaggtatctcagttcggtgtaggtcgttcgctccaagctgggctgtgtgcacgaaccccccgttcagcccgaccgctgcgccttatccggtaactatcgtcttgagtccaacccggtaagacacgacttatcgccactggcagcagccactggtaacaggattagcagagcgaggtatgtaggcggtgctacagagttcttgaagtggtggcctaactacggctacactagaagaacagtatttggtatctgcgctctgctgaagccagttaccttcggaaaaagagttggtagctcttgatccggcaaacaaaccaccgctggtagcggtggtttttttgtttgcaagcagcagattacgcgcagaaaaaaaggatctcaagaagatcctttgatcttttctacggggtctgacgctcagtggaacgaaaactcacgttaagggattttggtcatgagattatcaaaaaggatcttcacctagatccttttaaattaaaaatgaagttttaaatcaatctaaagtatatatgagtaaacttggtctgacagttaccaatgcttaatcagtgaggcacctatctcagcgatctgtctatttcgttcatccatagttgcctgactccccgtcgtgtagataactacgatacgggagggcttaccatctggccccagtgctgcaatgataccgcgagacccacgctcaccggctccagatttatcagcaataaaccagccagccggaagggccgagcgcagaagtggtcctgcaactttatccgcctccatccagtctattaattgttgccgggaagctagagtaagtagttcgccagttaatagtttgcgcaacgttgttgccattgctacaggcatcgtggtgtcacgctcgtcgtttggtatggcttcattcagctccggttcccaacgatcaaggcgagttacatgatcccccatgttgtgcaaaaaagcggttagctccttcggtcctccgatcgttgtcagaagtaagttggccgcagtgttatcactcatggttatggcagcactgcataattctcttactgtcatgccatccgtaagatgcttttctgtgactggtgagtactcaaccaagtcattctgagaatagtgtatgcggcgaccgagttgctcttgcccggcgtcaatacgggataataccgcgccacatagcagaactttaaaagtgctcatcattggaaaacgttcttcggggcgaaaactctcaaggatcttaccgctgttgagatccagttcgatgtaacccactcgtgcacccaactgatcttcagcatcttttactttcaccagcgtttctgggtgagcaaaaacaggaaggcaaaatgccgcaaaaaagggaataagggcgacacggaaatgttgaatactcatactcttcctttttcaatattattgaagcatttatcagggttattgtctcatgagcggatacatatttgaatgtatttagaaaaataaacaaataggggttccgcgcacatttccccgaaaagtgccacctgacgtctaagaaaccattattatcatgacattaacctataaaaataggcgtatcacgaggccctttcgtc

SEQ ID NO: 275 - DNA, 4487 bp, Artificial Sequence
  pLMTB9220
tcgcgcgtttcggtgatgacggtgaaaacctctgacacatgcagctcccggagacggtcacagcttgtctgtaagcggatgccgggagcagacaagcccgtcagggcgcgtcagcgggtgttggcgggtgtcggggctggcttaactatgcggcatcagagcagattgtactgagagtgcaccatatgcggtgtgaaataccgcacagatgcgtaaggagaaaataccgcatcaggcgccattcgccattcaggctgcgcaactgttgggaagggcgatcggtgcgggcctcttcgctattacgccagctggcgaaagggggatgtgctgcaaggcgattaagttgggtaacgccagggttttcccagtcacgacgttgtaaaacgacggccagtgaattgacgcgtattgggatatttaaatttagcgctccgtagctcgctgcgtatgagaggtactgagctccaatgcatcacacggcgtacggcaacacacactatcttttcagtttatttttttaattatccctccaaaaagaagcaactgacacttcaaaatattcccaacaaggagcgtgaggtcagtgaccagtctcggacttcacaccgcgcatgtagaagcacgcggcttgcgcgccaggcttcttttggcaaaccacgctgcacagaatgtctgtgtacagcagccaggctgtgatcgatctattatgctcgcccctcgctcctccggcattctcgagtccatgtcgagcttgtctggctccgtgcacatgcaagcgtttgtgcgcgcctctaatgtaaccacacgtcaaaacattgtgtgtcttccgaagtgggagacaccggggccaccaactccggtggtttacagcctcctccctcaaccaacgctgccgattgtaccacctttcattgcgtctttgtgcccctccctatcttcatgtttccactgcgcttcgtttccgaatactattttcgtgtactgtttcatcactttctcacaacagctcttttttttcacccgcagaagatgaagcgcatcctttgcatcacagggactcgagctgatttcggcaagctgaagccacttctggcgtacatcgagaatcaccccgatctggagctccacctgattgtgacagggatgcatatgatgaagacatatgggcgtacgtacaaggaggttacgcgcgagaactaccagcacacctacctgtttagtaaccagattcagggcgagccgatgggagcggtgttgggcaatacgattacctttattagccgcttgtcagacgagattgaaccagacatggtcatgatccatggcgaccgcctcgaagcgcttgcgggcgcagctgtgggcgccctgtcatcccgacttgtctgccacatcgagggcggagagctttcagggacagtagacgacagcatccgccactcgatctcgaagctgagtcacatccacctggtagcgaacgagcaggcggtgacccggctggtccagatgggcgagaagcgtaagcacattcatatcattggcagcccggaccttgacgtcatggcctcgtctacgctgccttccctcgaggaggtgaaggaatattacggcctgccgtacgagaattacggaatctcgatgttccatccagttaccacggaggctcaccttatgcctcagtacgctgctcagtactttaaggcgctcgaactgagcggtcaaaacatcatttccatataccctaacaacgacacaggtactgagagcatcttgcaggaacttctgaaataccagtcggataagtttattgcgttcccatcaattcggttcgagtactttctcgtactgctgaagcacgcaaagtttatggtggggaactccagcgctggtattcgagaggctccattgtacggcgtcccctctatcgacgtgggcacacgacaatcaaatcgccacatgggaaagtctataatccacacagactacgagacgaagaacatttttgacgccatccaacaggcctgctctctgggaaaattcgaggcagacgacacattcaatggtggcgacacccgcacctcaacggagcgctttgccgaggttatcaacaaccccgagacctggaacgtgagcgcacaaaagcgctttatcgacctgaacctgggcgggtccgggggcgagcagaagctcatctcggaagaagacctcgagcagaaactcattagtgaggaggacttggagcagaagctgatctcggaggaagatctctgaatttaaatatcccaatggcgcgccgagcttggctcgagcatggtcatagctgtttcctgtgtgaaattgttatccgctcacaattccacacaacatacgagccggaagcataaagtgtaaagcctggggtgcctaatgagtgagctaactcacattaattgcgttgcgctcactgcccgctttccagtcgggaaacctgtcgtgccagctgcattaatgaatcggccaacgcgcggggagaggcggtttgcgtattgggcgctcttccgcttcctcgctcactgactcgctgcgctcggtcgttcggctgcggcgagcggtatcagctcactcaaaggcggtaatacggttatccacagaatcaggggataacgcaggaaagaacatgtgagcaaaaggccagcaaaaggccaggaaccgtaaaaaggccgcgttgctggcgtttttccataggctccgcccccctgacgagcatcacaaaaatcgacgctcaagtcagaggtggcgaaacccgacaggactataaagataccaggcgtttccccctggaagctccctcgtgcgctctcctgttccgaccctgccgcttaccggatacctgtccgcctttctcccttcgggaagcgtggcgctttctcatagctcacgctgtaggtatctcagttcggtgtaggtcgttcgctccaagctgggctgtgtgcacgaaccccccgttcagcccgaccgctgcgccttatccggtaactatcgtcttgagtccaacccggtaagacacgacttatcgccactggcagcagccactggtaacaggattagcagagcgaggtatgtaggcggtgctacagagttcttgaagtggtggcctaactacggctacactagaagaacagtatttggtatctgcgctctgctgaagccagttaccttcggaaaaagagttggtagctcttgatccggcaaacaaaccaccgctggtagcggtggtttttttgtttgcaagcagcagattacgcgcagaaaaaaaggatctcaagaagatcctttgatcttttctacggggtctgacgctcagtggaacgaaaactcacgttaagggattttggtcatgagattatcaaaaaggatcttcacctagatccttttaaattaaaaatgaagttttaaatcaatctaaagtatatatgagtaaacttggtctgacagttagaaaaactcatcgagcatcaaatgaaactgcaatttattcatatcaggattatcaataccatatttttgaaaaagccgtttctgtaatgaaggagaaaactcaccgaggcagttccataggatggcaagatcctggtatcggtctgcgattccgactcgtccaacatcaatacaacctattaatttcccctcgtcaaaaataaggttatcaagtgagaaatcaccatgagtgacgactgaatccggtgagaatggcaaaagtttatgcatttctttccagacttgttcaacaggccagccattacgctcgtcatcaaaatcactcgcatcaaccaaaccgttattcattcgtgattgcgcctgagcgagacgaaatacgcgatcgctgttaaaaggacaattacaaacaggaatcgaatgcaaccggcgcaggaacactgccagcgcatcaacaatattttcacctgaatcaggatattcttctaatacctggaatgctgttttcccagggatcgcagtggtgagtaaccatgcatcatcaggagtacggataaaatgcttgatggtcggaagaggcataaattccgtcagccagtttagtctgaccatctcatctgtaacatcattggcaacgctacctttgccatgtttcagaaacaactctggcgcatcgggcttcccatacaatcgatagattgtcgcacctgattgcccgacattatcgcgagcccatttatacccatataaatcagcatccatgttggaatttaatcgcggcctagagcaagacgtttcccgttgaatatggctcatactcttcctttttcaatattattgaagcatttatcagggttattgtctcatgagcggatacatatttgaatgtatttagaaaaataaacaaataggggttccgcgcacatttccccgaaaagtgccacctgacgtctaagaaaccattattatcatgacattaacctataaaaataggcgtatcacgaggccctttcgtc

SEQ ID NO: 276 - DNA, 5104 bp, Artificial Sequence
  pLMTB9299
tggataacttggcgaaacgccaagctaatacatgaaccaaccgggtgttctccactccagacggtgggcaaccatcgtcgtgagacgcccagcgaatgaatgacagtaaaaccaatgccttcactggcagtaacacccagcagtgttgactcaattcattccgtgcgaaagccggcttgttccggcgtcttttgacgaacaactgccctatcagctggtgatggccgtgtagtggactgccatgcatggcgttgacgggagcgggggattagggttcgattccggagagggagcctgagaaatagctaccacttctacggagggcagcaggcgcgcaaattgcccaatgtcaaaacaaaacgatgaggcagcgaaaagaaatagagttgtcagtccatttggattgtcatttcaatgggggatatttaaacccatccaatatcgagtaacaattggaggacaagtctggtgccagcacccgcggtaattccagctccaaaagtcgcagcctgaccgcatcacacatcaaggcgttacagcctctccgtctttgctgcacccaagtgtattcgtgtgaccgcgttgagggatctaatggattcggaactttggtcgtttggtctctcatgctgcccaatcccatgcgcttttctccgtgcctctctgtctccccttccgttctatttggacaacgatgtgtactgtaatgcgtgcgccatctgacaacgaatagatcagcagcattcgcacacttgcacatacccagtgaagcttttgtgtctgtcgtattgacaacaccgactgcaacaaggtgtagatagaagttggccttctcgctcgctcgcacgctcttcacgctcctgctttccttgctgtgccttgccaccatggtccgcaagaagggatctctgatcctgtgtggggcgtttctgttcgtggcctggaacgcgctcttgctcctttttttgtggggccgcccgcccattggtcgactcggcgagggtgggggggcggagccgggcgcgggcgaggagtggggtgcggggaagagcaaagtgggtggcgctaacggcctggcgggtgaggttatccgcctggcggaggaggtcgagagtgagctggagacgcagaagaagcttctgaaacagatacagtcgcaccgcgagctttgggaacagcgtaaggaactggagaagcgtgaaagcgaggataccaaggacgagaagattgacgttgagcctaagaagccccgccagatcccggccgtgcacctgtcccacaaggtggtggaagacgcccagacagtaaccaagaaaatgcaaacgctgatggtgacaccgcctcagctggtgatgaaggagcaggagacagatcagaagaataagcagatgatggaggaccagctggggctcaccacgccatctccgcaaatcatcatcccgattctcgtgatcgcgtgcgatcgcgtgaccgtgaagcggtccctcgaccgtctgatccagtaccggccaagcgcagagttgtacccaattatcgtcagccaggattgtggccacgctgacacagcccgcgtgatcgggtcctatggcagccagatcacgcacataagccagcctgaccttgcagatataccggtgcggccagatcatcgcaagtttcaggggtactacaagatcgcccgccattaccgttgggcgctcaaccaggtgttcaacgtgtttgcctactcaacggtggtgatagtcgaggacgacctggaggtggcgcctgacttcttcgagtactttcgagctctctatccgatcttgcgctcagatcctaccttgtggtgcatttcggcttggaacgataacgggcgtgatggtctcgtggatcccgggaaggccgagctcctctaccgcacggacttctttcctggactgggttggatgttgcttaaggaggtgtgggcggaactcgaacccaagtggccaaaggcgttctgggacgactggatgcgacacccggagcagcgtaaaaatcgctcttgcatccgaccggaaattagtcggacgatcacattcggtcgtaaaggtgtgtccttggggcagttcttcgaccagtatctccgttacattaagctcaacactgaattcgtccctttcacgaagcacgacctcagctatcttgtgcgagagaagtacgatgttagctttgaaaaagatgtatactcggctcccctcgtaaaggtagaggagctgcagcacggcggcagccttaagggcagcggccccttccgagtacagtactcgagccgagacagtttcaaggtccttgcccgcaacctcggggtgatggatgacctgaagtcaggcgtgccacgcgccggttaccgcggcgtggtctcgttcatatctcgcggccggcgcatctacctcgcgccccctgagggttggacgaaatacgacgtgagctggagctaaatttaaatatcccaatggcgcgccgagcttggctcgagcatggtcatagctgtttcctgtgtgaaattgttatccgctcacaattccacacaacatacgagccggaagcataaagtgtaaagcctggggtgcctaatgagtgagctaactcacattaattgcgttgcgctcactgcccgctttccagtcgggaaacctgtcgtgccagctgcattaatgaatcggccaacgcgcggggagaggcggtttgcgtattgggcgctcttccgcttcctcgctcactgactcgctgcgctcggtcgttcggctgcggcgagcggtatcagctcactcaaaggcggtaatacggttatccacagaatcaggggataacgcaggaaagaacatgtgagcaaaaggccagcaaaaggccaggaaccgtaaaaaggccgcgttgctggcgtttttccataggctccgcccccctgacgagcatcacaaaaatcgacgctcaagtcagaggtggcgaaacccgacaggactataaagataccaggcgtttccccctggaagctccctcgtgcgctctcctgttccgaccctgccgcttaccggatacctgtccgcctttctcccttcgggaagcgtggcgctttctcatagctcacgctgtaggtatctcagttcggtgtaggtcgttcgctccaagctgggctgtgtgcacgaaccccccgttcagcccgaccgctgcgccttatccggtaactatcgtcttgagtccaacccggtaagacacgacttatcgccactggcagcagccactggtaacaggattagcagagcgaggtatgtaggcggtgctacagagttcttgaagtggtggcctaactacggctacactagaagaacagtatttggtatctgcgctctgctgaagccagttaccttcggaaaaagagttggtagctcttgatccggcaaacaaaccaccgctggtagcggtggtttttttgtttgcaagcagcagattacgcgcagaaaaaaaggatctcaagaagatcctttgatcttttctacggggtctgacgctcagtggaacgaaaactcacgttaagggattttggtcatgagattatcaaaaaggatcttcacctagatccttttaaattaaaaatgaagttttaaatcaatctaaagtatatatgagtaaacttggtctgacagttagaaaaactcatcgagcatcaaatgaaactgcaatttattcatatcaggattatcaataccatatttttgaaaaagccgtttctgtaatgaaggagaaaactcaccgaggcagttccataggatggcaagatcctggtatcggtctgcgattccgactcgtccaacatcaatacaacctattaatttcccctcgtcaaaaataaggttatcaagtgagaaatcaccatgagtgacgactgaatccggtgagaatggcaaaagtttatgcatttctttccagacttgttcaacaggccagccattacgctcgtcatcaaaatcactcgcatcaaccaaaccgttattcattcgtgattgcgcctgagcgagacgaaatacgcgatcgctgttaaaaggacaattacaaacaggaatcgaatgcaaccggcgcaggaacactgccagcgcatcaacaatattttcacctgaatcaggatattcttctaatacctggaatgctgttttcccagggatcgcagtggtgagtaaccatgcatcatcaggagtacggataaaatgcttgatggtcggaagaggcataaattccgtcagccagtttagtctgaccatctcatctgtaacatcattggcaacgctacctttgccatgtttcagaaacaactctggcgcatcgggcttcccatacaatcgatagattgtcgcacctgattgcccgacattatcgcgagcccatttatacccatataaatcagcatccatgttggaatttaatcgcggcctagagcaagacgtttcccgttgaatatggctcatactcttcctttttcaatattattgaagcatttatcagggttattgtctcatgagcggatacatatttgaatgtatttagaaaaataaacaaataggggttccgcgcacatttccccgaaaagtgccacctgacgtctaagaaaccattattatcatgacattaacctataaaaataggcgtatcacgaggccctttcgtctcgcgcgtttcggtgatgacggtgaaaacctctgacacatgcagctcccggagacggtcacagcttgtctgtaagcggatgccgggagcagacaagcccgtcagggcgcgtcagcgggtgttggcgggtgtcggggctggcttaactatgcggcatcagagcagattgtactgagagtgcaccatatgcggtgtgaaataccgcacagatgcgtaaggagaaaataccgcatcaggcgccattcgccattcaggctgcgcaactgttgggaagggcgatcggtgcgggcctcttcgctattacgccagctggcgaaagggggatgtgctgcaaggcgattaagttgggtaacgccagggttttcccagtcacgacgttgtaaaacgacggccagtgaattgacgcgtattgggatatttaaat

SEQ ID NO: 277 - DNA, 4861 bp, Artificial Sequence
  pLMTB9301
tggataacttggcgaaacgccaagctaatacatgaaccaaccgggtgttctccactccagacggtgggcaaccatcgtcgtgagacgcccagcgaatgaatgacagtaaaaccaatgccttcactggcagtaacacccagcagtgttgactcaattcattccgtgcgaaagccggcttgttccggcgtcttttgacgaacaactgccctatcagctggtgatggccgtgtagtggactgccatgcatggcgttgacgggagcgggggattagggttcgattccggagagggagcctgagaaatagctaccacttctacggagggcagcaggcgcgcaaattgcccaatgtcaaaacaaaacgatgaggcagcgaaaagaaatagagttgtcagtccatttggattgtcatttcaatgggggatatttaaacccatccaatatcgagtaacaattggaggacaagtctggtgccagcacccgcggtaattccagctccaaaagtcgcagcctgaccgcatcacacatcaaggcgttacagcctctccgtctttgctgcacccaagtgtattcgtgtgaccgcgttgagggatctaatggattcggaactttggtcgtttggtctctcatgctgcccaatcccatgcgcttttctccgtgcctctctgtctccccttccgttctatttggacaacgatgtgtactgtaatgcgtgcgccatctgacaacgaatagatcagcagcattcgcacacttgcacatacccagtgaagcttttgtgtctgtcgtattgacaacaccgactgcaacaaggtgtagatagaagttggccttctcgctcgctcgcacgctcttcacgctcctgctttccttgctgtgccttgccaccatgcgcctgaatgttaagaaggcgcttatatttgttggatgcgtcgtgttcctctgggtccttctgagctacgcgagcgtcattgaagtgcctcgtgcagtcccccagaaagacccggccgtcgaaatcgaaaagaagatcatcaagcttcaaaagcaggtcgatgcacaaatggcggagtccaagagcttgctcgccaaggtgaagaaactgaagaagatcagtgagggagagaacgttggcggcgaggaggactcgctgaaggacagtgaggttatgcagcacctgtctcagccgatcctccccgttctggtgattgcctgcgaccgcgtcactgtgcagcgttgtttggacaacctggtgaagttccgcccctcgaaggaaacgttccccatcattgtttcgcaagattgtggccacaacgcgacctatgaagtcattacgtcatacacggcctccgacccgactatctctgtggtgcgtcagcctgatttgagcgaaatcgtcctcccccgcgtgaaggtgaagttccgcggctattacaagattgctcggcactacaaatttgcccttaaccacgtttttgagacccttggccacgaggcggtgatcatcgtggaagacgacctggatatcagtccagatttctttgagtacttcctggggacgtacccgctgcttttgaaagacccgtccttgtggtgcatctcggcgtggaacgacaacggtaagatggaggtcatcgacatgtcgcgcccggacctgctgcaccgcaccgacttctttccgggccttggctgggtcctgcgccgcgaaatgtggcgtaagcttgctccaaaatggcccaccgcgttttttgacgactggctgcgaaacccggttaacatcgacggcaaggcctgcatccgcccagagatatctcgtacctatagtttcgggaaggtgggtgtgtctaagggactgttcttcgatcttcacctccgcaacattcagctcaatatggaatacgtcgaatttacgaaactgaacctcacatacctgcttaaggaacactacgacgatgccctcgtctccaccgtttacaatctgccggagatgagtgcatccgaggtggttgcaggcagcgatctcagcgcagacccggtgcgtgttatgtactccaatgccaagacatatcagcgcgccgcgaaaaagctcggcctgatggacgacttccgctccggggtaccgcgcacggcctaccgcggcatcgtgacgtgtttcattcggggccgacgagtataccttgccccgtcgtttgagtggaacaagtacgacccgacctggggatagatttaaatatcccaatggcgcgccgagcttggctcgagcatggtcatagctgtttcctgtgtgaaattgttatccgctcacaattccacacaacatacgagccggaagcataaagtgtaaagcctggggtgcctaatgagtgagctaactcacattaattgcgttgcgctcactgcccgctttccagtcgggaaacctgtcgtgccagctgcattaatgaatcggccaacgcgcggggagaggcggtttgcgtattgggcgctcttccgcttcctcgctcactgactcgctgcgctcggtcgttcggctgcggcgagcggtatcagctcactcaaaggcggtaatacggttatccacagaatcaggggataacgcaggaaagaacatgtgagcaaaaggccagcaaaaggccaggaaccgtaaaaaggccgcgttgctggcgtttttccataggctccgcccccctgacgagcatcacaaaaatcgacgctcaagtcagaggtggcgaaacccgacaggactataaagataccaggcgtttccccctggaagctccctcgtgcgctctcctgttccgaccctgccgcttaccggatacctgtccgcctttctcccttcgggaagcgtggcgctttctcatagctcacgctgtaggtatctcagttcggtgtaggtcgttcgctccaagctgggctgtgtgcacgaaccccccgttcagcccgaccgctgcgccttatccggtaactatcgtcttgagtccaacccggtaagacacgacttatcgccactggcagcagccactggtaacaggattagcagagcgaggtatgtaggcggtgctacagagttcttgaagtggtggcctaactacggctacactagaagaacagtatttggtatctgcgctctgctgaagccagttaccttcggaaaaagagttggtagctcttgatccggcaaacaaaccaccgctggtagcggtggtttttttgtttgcaagcagcagattacgcgcagaaaaaaaggatctcaagaagatcctttgatcttttctacggggtctgacgctcagtggaacgaaaactcacgttaagggattttggtcatgagattatcaaaaaggatcttcacctagatccttttaaattaaaaatgaagttttaaatcaatctaaagtatatatgagtaaacttggtctgacagttagaaaaactcatcgagcatcaaatgaaactgcaatttattcatatcaggattatcaataccatatttttgaaaaagccgtttctgtaatgaaggagaaaactcaccgaggcagttccataggatggcaagatcctggtatcggtctgcgattccgactcgtccaacatcaatacaacctattaatttcccctcgtcaaaaataaggttatcaagtgagaaatcaccatgagtgacgactgaatccggtgagaatggcaaaagtttatgcatttctttccagacttgttcaacaggccagccattacgctcgtcatcaaaatcactcgcatcaaccaaaccgttattcattcgtgattgcgcctgagcgagacgaaatacgcgatcgctgttaaaaggacaattacaaacaggaatcgaatgcaaccggcgcaggaacactgccagcgcatcaacaatattttcacctgaatcaggatattcttctaatacctggaatgctgttttcccagggatcgcagtggtgagtaaccatgcatcatcaggagtacggataaaatgcttgatggtcggaagaggcataaattccgtcagccagtttagtctgaccatctcatctgtaacatcattggcaacgctacctttgccatgtttcagaaacaactctggcgcatcgggcttcccatacaatcgatagattgtcgcacctgattgcccgacattatcgcgagcccatttatacccatataaatcagcatccatgttggaatttaatcgcggcctagagcaagacgtttcccgttgaatatggctcatactcttcctttttcaatattattgaagcatttatcagggttattgtctcatgagcggatacatatttgaatgtatttagaaaaataaacaaataggggttccgcgcacatttccccgaaaagtgccacctgacgtctaagaaaccattattatcatgacattaacctataaaaataggcgtatcacgaggccctttcgtctcgcgcgtttcggtgatgacggtgaaaacctctgacacatgcagctcccggagacggtcacagcttgtctgtaagcggatgccgggagcagacaagcccgtcagggcgcgtcagcgggtgttggcgggtgtcggggctggcttaactatgcggcatcagagcagattgtactgagagtgcaccatatgcggtgtgaaataccgcacagatgcgtaaggagaaaataccgcatcaggcgccattcgccattcaggctgcgcaactgttgggaagggcgatcggtgcgggcctcttcgctattacgccagctggcgaaagggggatgtgctgcaaggcgattaagttgggtaacgccagggttttcccagtcacgacgttgtaaaacgacggccagtgaattgacgcgtattgggatatttaaat

SEQ ID NO: 278 - DNA, 4065 bp, Artificial Sequence
  pLMTB9304
gcagctctctctagcgacggccgcatcttcactggtgtcaatgtatatcattttactgggggaccttgtgcagaactcgtggtgctgggcactgctgctgctgcggcagctggcaacctgacttgtatcgtcgcgatcggaaatgagaacaggggcatcttgagcccctgcggacggtgccgacaggtgcttctcgatctgcatcctgggatcaaagccatagtgaaggacagtgatggacagccgacggcagttgggattcgtgaattgctgccctctggttatgtgtgggagggctaactagcctcggagatccactagttctagttctaggggccgaattcagatcctcgtgtgagcgttcgcggaatcggtcgctcgtgtttatgcccgtcttggtgttgtgctcgcaaggcggtgcagcaggataccgtcgccctcctctctccttgcttctctgttcttcaattcgcgatctcacagaggccggctgtgcacgcccttcctcaccctccttttcccacctctcggccaccggtcggctccgttccgtctgccgtcgagaagggacgggcatgtgcagctcctccctttctctcgcgcgcgcatcttctcttgcttgtggcactcacgctcatgcgtcaaggcggccccacgccgagcccctgcgctcccttccctcttgcgcatccgtagcgcggatgccgtcgatgcgcaaggccggcatgaaggagcgcgtgccctcaagagggcacactatcatgccctacgtgggccacgcagcgatgaggccggcttcggcggagatgcgtcacgcacgtgccagatgatgcgctacgccttccttgacttgcgcccccctctcttcctccgtctctcactctctctctctcacacacacacacacacacacacacacacaaagctccggttcgtccggccgtaacgccttttcaactcacggcctctaggaatgaaggagggtagttcgggggagaacgtactggggcgtcagaggtgaaattcttagaccgcaccaagacgaactacagcgaaggcattcttcaaggataccttcctcaatcaagaaccaaagtgtggagatcgaagatgattagagaccattgtagtccacactgcaaacgatgacacccatgaattggggatcttatgggccggcctgcggcagggtttaccctgtgtcagcaccgcgcccgcttttaccaacttacgtatcttttctattcggcctttaccggccacccacgggaatatcctcagcacgttttctgttttttcacgcgaaagctctgaggttacagtctcaggggggagtacgttcgcaagagtgaaacttaaagaaattgacggaatggcaccacaagacgtggagcgtgcggtttaatttgactcaacacggggaatttaaatatcccaatggcgcgccgagcttggctcgagcatggtcatagctgtttcctgtgtgaaattgttatccgctcacaattccacacaacatacgagccggaagcataaagtgtaaagcctggggtgcctaatgagtgagctaactcacattaattgcgttgcgctcactgcccgctttccagtcgggaaacctgtcgtgccagctgcattaatgaatcggccaacgcgcggggagaggcggtttgcgtattgggcgctcttccgcttcctcgctcactgactcgctgcgctcggtcgttcggctgcggcgagcggtatcagctcactcaaaggcggtaatacggttatccacagaatcaggggataacgcaggaaagaacatgtgagcaaaaggccagcaaaaggccaggaaccgtaaaaaggccgcgttgctggcgtttttccataggctccgcccccctgacgagcatcacaaaaatcgacgctcaagtcagaggtggcgaaacccgacaggactataaagataccaggcgtttccccctggaagctccctcgtgcgctctcctgttccgaccctgccgcttaccggatacctgtccgcctttctcccttcgggaagcgtggcgctttctcatagctcacgctgtaggtatctcagttcggtgtaggtcgttcgctccaagctgggctgtgtgcacgaaccccccgttcagcccgaccgctgcgccttatccggtaactatcgtcttgagtccaacccggtaagacacgacttatcgccactggcagcagccactggtaacaggattagcagagcgaggtatgtaggcggtgctacagagttcttgaagtggtggcctaactacggctacactagaagaacagtatttggtatctgcgctctgctgaagccagttaccttcggaaaaagagttggtagctcttgatccggcaaacaaaccaccgctggtagcggtggtttttttgtttgcaagcagcagattacgcgcagaaaaaaaggatctcaagaagatcctttgatcttttctacggggtctgacgctcagtggaacgaaaactcacgttaagggattttggtcatgagattatcaaaaaggatcttcacctagatccttttaaattaaaaatgaagttttaaatcaatctaaagtatatatgagtaaacttggtctgacagttagaaaaactcatcgagcatcaaatgaaactgcaatttattcatatcaggattatcaataccatatttttgaaaaagccgtttctgtaatgaaggagaaaactcaccgaggcagttccataggatggcaagatcctggtatcggtctgcgattccgactcgtccaacatcaatacaacctattaatttcccctcgtcaaaaataaggttatcaagtgagaaatcaccatgagtgacgactgaatccggtgagaatggcaaaagtttatgcatttctttccagacttgttcaacaggccagccattacgctcgtcatcaaaatcactcgcatcaaccaaaccgttattcattcgtgattgcgcctgagcgagacgaaatacgcgatcgctgttaaaaggacaattacaaacaggaatcgaatgcaaccggcgcaggaacactgccagcgcatcaacaatattttcacctgaatcaggatattcttctaatacctggaatgctgttttcccagggatcgcagtggtgagtaaccatgcatcatcaggagtacggataaaatgcttgatggtcggaagaggcataaattccgtcagccagtttagtctgaccatctcatctgtaacatcattggcaacgctacctttgccatgtttcagaaacaactctggcgcatcgggcttcccatacaatcgatagattgtcgcacctgattgcccgacattatcgcgagcccatttatacccatataaatcagcatccatgttggaatttaatcgcggcctagagcaagacgtttcccgttgaatatggctcatactcttcctttttcaatattattgaagcatttatcagggttattgtctcatgagcggatacatatttgaatgtatttagaaaaataaacaaataggggttccgcgcacatttccccgaaaagtgccacctgacgtctaagaaaccattattatcatgacattaacctataaaaataggcgtatcacgaggccctttcgtctcgcgcgtttcggtgatgacggtgaaaacctctgacacatgcagctcccggagacggtcacagcttgtctgtaagcggatgccgggagcagacaagcccgtcagggcgcgtcagcgggtgttggcgggtgtcggggctggcttaactatgcggcatcagagcagattgtactgagagtgcaccatatgcggtgtgaaataccgcacagatgcgtaaggagaaaataccgcatcaggcgccattcgccattcaggctgcgcaactgttgggaagggcgatcggtgcgggcctcttcgctattacgccagctggcgaaagggggatgtgctgcaaggcgattaagttgggtaacgccagggttttcccagtcacgacgttgtaaaacgacggccagtgaattgacgcgtattgggatatttaaat

SEQ ID NO: 279 - DNA, 4962 bp, Artificial Sequence
  pLMTB9320
atgcgcctccgagaacccctgctgagcggatcagccgcgatgccgggtgcctccctccaacgcgcctgtcgcctccttgtggcggtatgcgcactgcaccttggtgtaacactggtctactacctggccgggcgggaccttagccggctcccgcaattggtcggtgtgtcgaccccactgcagggtggctccaattcagcggccgctataggccagtcgtctggcgagttgcgaacaggtggcgcgcgccccccgccaccgttgggcgccagctctcagccgcgccccggtggcgattcaagcccagtggttgacagcggcccgggcccagctagcaacctgacatcggtcccggtgcctcacacgaccgcgctgtccctccccgcatgcccggaggagagcccactccttgtgggccccatgctcatcgagttcaacatgcccgtagatctcgagctcgtggctaagcagaaccccaacgtcaagatgggtggacgctatgcaccgcgagactgtgttagcccacacaaggtggctatcatcattccgttccgcaaccgccaggagcatctgaagtactggctgtactacctgcaccccgtgctccagcggcagcagctggactacggtatctacgtaatcaaccaggcgggcgacaccatcttcaatcgcgcaaagcttcttaacgtcggttttcaggaggctctcaaggactatgactacacctgcttcgtgttctcggacgtcgacctcattccaatgaacgaccacaacgcgtaccgctgcttttcccagccccgccacatctcagttgcaatggataagttcgggttctcgctcccctacgttcagtactttggtggtgtgtccgccctcagcaagcaacagtttctgacaatcaatggctttccgaacaactactggggctggggcggcgaggacgacgacattttcaaccgattggtgttccgcggaatgtctatctctcgtcccaacgcggtcgtagggcgatgccgaatgatacgacattcgcgggataagaagaatgagccgaatccgcagcgctttgaccggatcgcccataccaaggagacgatgctgagcgacggactgaatagtctcacctaccaggtactcgacgtgcagcgctacccactgtatacgcagatcacggtagacatcggaacgccgagctgactagcctcggagatccactagttctagttctaggggccgaattcagatcctcgtgtgagcgttcgcggaatcggtcgctcgtgtttatgcccgtcttggtgttgtgctcgcaaggcggtgcagcaggataccgtcgccctcctctctccttgcttctctgttcttcaattcgcgatctcacagaggccggctgtgcacgcccttcctcaccctccttttcccacctctcggccaccggtcggctccgttccgtctgccgtcgagaagggacgggcatgtgcagctcctccctttctctcgcgcgcgcatcttctcttgcttgtggcactcacgctcatgcgtcaaggcggccccacgccgagcccctgcgctcccttccctcttgcgcatccgtagcgcggatgccgtcgatgcgcaaggccggcatgaaggagcgcgtgccctcaagagggcacactatcatgccctacgtgggccacgcagcgatgaggccggcttcggcggagatgcgtcacgcacgtgccagatgatgcgctacgccttccttgacttgcgcccccctctcttcctccgtctctcactctctctctctcacacacacacacacacacacacacacacaaatgatgtcccctgaagatgcgaccgggctggaggctgcacgcaagcagaagatccataacctgaagctgaagacggcgtgcctagagaatgaggagcttgtgcaggagctgcacatctctgactggtcagagacgcagcgacagaagctgcgcggcgcccatgagaagggcgaggagctgcttgcgtccgtggaggttgggacgaagtggaacctgatggaggcgtacgacctggcgaagctgatgcgcgtgtgcgggctggagatgagtcagcgcgagctgtaccgcccggaggacaagccgcagttcatggacatcattggcgtgaagaaggtgctacaggaccttcgacagaaccggaacaagacgcgcgttgtgagcttcacgcagctgatcgacaacagcatcgcgaagatggagaaggtggaggaggagctgcggcggtcgcagctggacgcgacgcagctcgcgcaggtgccgtctcggacggtgaagatgatatttaaatatcccaatggcgcgccgagcttggctcgagcatggtcatagctgtttcctgtgtgaaattgttatccgctcacaattccacacaacatacgagccggaagcataaagtgtaaagcctggggtgcctaatgagtgagctaactcacattaattgcgttgcgctcactgcccgctttccagtcgggaaacctgtcgtgccagctgcattaatgaatcggccaacgcgcggggagaggcggtttgcgtattgggcgctcttccgcttcctcgctcactgactcgctgcgctcggtcgttcggctgcggcgagcggtatcagctcactcaaaggcggtaatacggttatccacagaatcaggggataacgcaggaaagaacatgtgagcaaaaggccagcaaaaggccaggaaccgtaaaaaggccgcgttgctggcgtttttccataggctccgcccccctgacgagcatcacaaaaatcgacgctcaagtcagaggtggcgaaacccgacaggactataaagataccaggcgtttccccctggaagctccctcgtgcgctctcctgttccgaccctgccgcttaccggatacctgtccgcctttctcccttcgggaagcgtggcgctttctcatagctcacgctgtaggtatctcagttcggtgtaggtcgttcgctccaagctgggctgtgtgcacgaaccccccgttcagcccgaccgctgcgccttatccggtaactatcgtcttgagtccaacccggtaagacacgacttatcgccactggcagcagccactggtaacaggattagcagagcgaggtatgtaggcggtgctacagagttcttgaagtggtggcctaactacggctacactagaagaacagtatttggtatctgcgctctgctgaagccagttaccttcggaaaaagagttggtagctcttgatccggcaaacaaaccaccgctggtagcggtggtttttttgtttgcaagcagcagattacgcgcagaaaaaaaggatctcaagaagatcctttgatcttttctacggggtctgacgctcagtggaacgaaaactcacgttaagggattttggtcatgagattatcaaaaaggatcttcacctagatccttttaaattaaaaatgaagttttaaatcaatctaaagtatatatgagtaaacttggtctgacagttagaaaaactcatcgagcatcaaatgaaactgcaatttattcatatcaggattatcaataccatatttttgaaaaagccgtttctgtaatgaaggagaaaactcaccgaggcagttccataggatggcaagatcctggtatcggtctgcgattccgactcgtccaacatcaatacaacctattaatttcccctcgtcaaaaataaggttatcaagtgagaaatcaccatgagtgacgactgaatccggtgagaatggcaaaagtttatgcatttctttccagacttgttcaacaggccagccattacgctcgtcatcaaaatcactcgcatcaaccaaaccgttattcattcgtgattgcgcctgagcgagacgaaatacgcgatcgctgttaaaaggacaattacaaacaggaatcgaatgcaaccggcgcaggaacactgccagcgcatcaacaatattttcacctgaatcaggatattcttctaatacctggaatgctgttttcccagggatcgcagtggtgagtaaccatgcatcatcaggagtacggataaaatgcttgatggtcggaagaggcataaattccgtcagccagtttagtctgaccatctcatctgtaacatcattggcaacgctacctttgccatgtttcagaaacaactctggcgcatcgggcttcccatacaatcgatagattgtcgcacctgattgcccgacattatcgcgagcccatttatacccatataaatcagcatccatgttggaatttaatcgcggcctagagcaagacgtttcccgttgaatatggctcatactcttcctttttcaatattattgaagcatttatcagggttattgtctcatgagcggatacatatttgaatgtatttagaaaaataaacaaataggggttccgcgcacatttccccgaaaagtgccacctgacgtctaagaaaccattattatcatgacattaacctataaaaataggcgtatcacgaggccctttcgtctcgcgcgtttcggtgatgacggtgaaaacctctgacacatgcagctcccggagacggtcacagcttgtctgtaagcggatgccgggagcagacaagcccgtcagggcgcgtcagcgggtgttggcgggtgtcggggctggcttaactatgcggcatcagagcagattgtactgagagtgcaccatatgcggtgtgaaataccgcacagatgcgtaaggagaaaataccgcatcaggcgccattcgccattcaggctgcgcaactgttgggaagggcgatcggtgcgggcctcttcgctattacgccagctggcgaaagggggatgtgctgcaaggcgattaagttgggtaacgccagggttttcccagtcacgacgttgtaaaacgacggccagtgaattgacgcgtattgggatatttaaat

SEQ ID NO: 280 - DNA, 5241 bp, Artificial Sequence
  pLMTB9339
ctcccacgaaactctacatcatgtcccatcaagattcgattgatatcgacacggagttggatctgcagcaggcggagaacatactgaatcacaaggagtccggagggagtggcggttacccgtacgacgtgcccgactacgcctacccgtacgatgtgccggattacgcgtatccatatgacgtgccagactatgcgtaggtcgaacgctcacttttgagcacacgactctctacttgtctcccgctctgatgtctctttccttatttctgcgcctgcaggtaaaagaagtgcatccgcatggctgtcttttaacggggacagcgaggcgtgctggcggcaactgtgtgcgcttgtgtgcgcgcacgttacgctgagagaacctcacatttcctttttgtttttactgttaattttctgtatgtccttttctcggcctcttgtcgcgtctgctccccccccgatggggcgctggcgaggcggagaggtcataggttcctcgttataagccagtagcggtgctgcacgggcatgccctatggagggagaaggggtgctgcgtggaaaagggagcgcagtgcgccagaacacaagcgtgcgcgcttgtaggtgcgcacatgtttgctacttttttttctctccgttccgctctggctagtgatcttcgccactgccgagtgggtgttggcctgctgcagagactgcaacattgctcccggtgcgggctgtgtgcggtcatcgcgtgtgcgcagctgcagtgtgcggaggggccgtccaggcacggtcttacttcaatctccgctgctatgggtgcgtcctgatgaaggccctgcctacggatcgcctttctgtaggcgctcttgtccatctctgctgtagctcaactttctgcgcttgtttttcctctttttgttcttcggcatctccgcctttgttggtgactggtactgccttgcgtctccatgaactaaaacaacggctgcatatcttccccttcccttgcggatataaaactcgtacctgtgcgactttctcacgttcgccgcacgctcacggacgttcgacgtccaatcgatgcgcgcatgcgcaccatgacgctttttcgaagtttctacgcctcgccatcgtacagacacttaagctaacaactcgctcacacactcgagatgattgcaagcagtgtccgccatgcggtaatcttgcttcttgtagcggtcgcgatgatggttaacaacgtcattgctcctgaagcttcattccaagtgtggaacaaagattcaagtagcaagaaccttataccacggcttcaaaaaatctggaaaaactacctttcgatgaataaatataaggttagttataagggacccggccctgggattaagttctctgcggaagcactccggtgtcacttgcgcgatcatgtgaacgttagcatggttgaggttacagattttccatttaacacttccgagtgggaggggtaccttccgaaagagtcgattcgtaccaaagcaggaccctggggtcgctgcgcagtggttagtagcgcaggatcgctgaaatcatcacagctcggacgcgaaatcgacgatcatgacgcagtacttcgattcaatggcgctcctacagccaattttcaacaggacgttggaaccaagactacgatacggcttatgaacagccaattggttacgacagaaaaacgatttcttaaggacagcctttataacgaaggcattctgatagtttgggaccctagtgtttatcatagcgacataccgaaatggtatcagaaccctgattataacttcttcaataattacaagacataccgaaagcttcaccccaaccagcctttctacatacttaagccgcagatgccttgggagttgtgggacattctgcaagagatctcgcccgaggaaatccagcccaaccctccatcatcgggtatgctcgggattattataatgatgactctctgtgatcaagtcgacatatacgagtttctccccagcaagcgtaaaacagatgtttgctattactaccagaagttctttgactcggcatgcacaatgggtgcctaccatccccttctctatgagaagaatctggttaaacaccttaatcagggaaccgacgaggatatctaccttctcgggaaagctacgcttcctggttttcgtactattcactgctaatcagcgctccgtagctcgctgcacatgcggtactgcgttccagagcatcacgcgacgcacagcaacacaaactttctttatctttctcttccattcgaaaaaaaaaaagataacacccacctcacataacgtccataacaagagagcgtgagaggagagtctgctcttcgacttcacaccgcgaatgcggcaacacgtggcttatgcgcaacgcttcttttggcacgtcatgctaaacagaatctctgcgtagggcaaccaggctttcatcgacccgtcgttcgatcctcgctcctccggcattcttgagtcacgacacgaatgcttggctccgtgcgtctgcgagcgtttgtgcgttcctctaaagcaagaacgcggggacacgacgtttatctccgcatttaaatatcccaatggcgcgccgagcttggctcgagcatggtcatagctgtttcctgtgtgaaattgttatccgctcacaattccacacaacatacgagccggaagcataaagtgtaaagcctggggtgcctaatgagtgagctaactcacattaattgcgttgcgctcactgcccgctttccagtcgggaaacctgtcgtgccagctgcattaatgaatcggccaacgcgcggggagaggcggtttgcgtattgggcgctcttccgcttcctcgctcactgactcgctgcgctcggtcgttcggctgcggcgagcggtatcagctcactcaaaggcggtaatacggttatccacagaatcaggggataacgcaggaaagaacatgtgagcaaaaggccagcaaaaggccaggaaccgtaaaaaggccgcgttgctggcgtttttccataggctccgcccccctgacgagcatcacaaaaatcgacgctcaagtcagaggtggcgaaacccgacaggactataaagataccaggcgtttccccctggaagctccctcgtgcgctctcctgttccgaccctgccgcttaccggatacctgtccgcctttctcccttcgggaagcgtggcgctttctcatagctcacgctgtaggtatctcagttcggtgtaggtcgttcgctccaagctgggctgtgtgcacgaaccccccgttcagcccgaccgctgcgccttatccggtaactatcgtcttgagtccaacccggtaagacacgacttatcgccactggcagcagccactggtaacaggattagcagagcgaggtatgtaggcggtgctacagagttcttgaagtggtggcctaactacggctacactagaagaacagtatttggtatctgcgctctgctgaagccagttaccttcggaaaaagagttggtagctcttgatccggcaaacaaaccaccgctggtagcggtggtttttttgtttgcaagcagcagattacgcgcagaaaaaaaggatctcaagaagatcctttgatcttttctacggggtctgacgctcagtggaacgaaaactcacgttaagggattttggtcatgagattatcaaaaaggatcttcacctagatccttttaaattaaaaatgaagttttaaatcaatctaaagtatatatgagtaaacttggtctgacagttagaaaaactcatcgagcatcaaatgaaactgcaatttattcatatcaggattatcaataccatatttttgaaaaagccgtttctgtaatgaaggagaaaactcaccgaggcagttccataggatggcaagatcctggtatcggtctgcgattccgactcgtccaacatcaatacaacctattaatttcccctcgtcaaaaataaggttatcaagtgagaaatcaccatgagtgacgactgaatccggtgagaatggcaaaagtttatgcatttctttccagacttgttcaacaggccagccattacgctcgtcatcaaaatcactcgcatcaaccaaaccgttattcattcgtgattgcgcctgagcgagacgaaatacgcgatcgctgttaaaaggacaattacaaacaggaatcgaatgcaaccggcgcaggaacactgccagcgcatcaacaatattttcacctgaatcaggatattcttctaatacctggaatgctgttttcccagggatcgcagtggtgagtaaccatgcatcatcaggagtacggataaaatgcttgatggtcggaagaggcataaattccgtcagccagtttagtctgaccatctcatctgtaacatcattggcaacgctacctttgccatgtttcagaaacaactctggcgcatcgggcttcccatacaatcgatagattgtcgcacctgattgcccgacattatcgcgagcccatttatacccatataaatcagcatccatgttggaatttaatcgcggcctagagcaagacgtttcccgttgaatatggctcatactcttcctttttcaatattattgaagcatttatcagggttattgtctcatgagcggatacatatttgaatgtatttagaaaaataaacaaataggggttccgcgcacatttccccgaaaagtgccacctgacgtctaagaaaccattattatcatgacattaacctataaaaataggcgtatcacgaggccctttcgtctcgcgcgtttcggtgatgacggtgaaaacctctgacacatgcagctcccggagacggtcacagcttgtctgtaagcggatgccgggagcagacaagcccgtcagggcgcgtcagcgggtgttggcgggtgtcggggctggcttaactatgcggcatcagagcagattgtactgagagtgcaccatatgcggtgtgaaataccgcacagatgcgtaaggagaaaataccgcatcaggcgccattcgccattcaggctgcgcaactgttgggaagggcgatcggtgcgggcctcttcgctattacgccagctggcgaaagggggatgtgctgcaaggcgattaagttgggtaacgccagggttttcccagtcacgacgttgtaaaacgacggccagtgaattgacgcgtattgggatatttaaat

SEQ ID NO: 281 - DNA, 4276 bp, Artificial Sequence
  pLMTB9340
gcttatgcgcaacgcttcttttggcacgtcatgctaaacagaatctctgcgtagggcaaccaggctttcatcgacccgtcgttcgatcctcgctcctccggcattcttgagtcacgacacgaatgcttggctccgtgcgtctgcgagcgtttgtgcgttcctctaaagcaagaacgcggggacacgacgtttatctccgcctcgcgacgcactttctttaccaactacgtgcacttacaaccccccgatctcaaaacctctgctcatcgcatcacttctcattccgtcgttgtgcctctctctaccttcatctcccgcttgtgcttggtttcctaataccgttctcgtgtaatgcctcatcccttttccactacagctctttttttcccctcgccgaagatgattgctagttctgtccgacacgccgtaatccttcttcttgttgctgtggcgatgatggtcaacaacgtgatcgcacctgaggcttcctttcaggtgtggaacaaggactcgtcctcgaaaaacctgatcccgcggctgcagaagatctggaagaactatcttagcatgaataagtacaaggtctcatacaagggcccgggccccggaattaagttctctgctgaagctctgcggtgccacttgcgagaccatgtgaatgtgagtatggtggaggtgaccgacttccccttcaacacctcggagtgggaaggttatctgccgaaggagagtatccgcacaaaagctggtccttggggccgatgtgctgtcgtgtcaagcgcaggctcgctgaagtcgagccagctgggccgcgaaattgacgatcacgatgcggtgctccgcttcaacggtgcccccaccgccaactttcagcaggacgttggtactaagacaacgattcggctgatgaattcccagctcgttacgacggagaaacgcttcctcaaggactctctgtacaacgagggcatcctgattgtttgggatccgagcgtgtatcactcggatatcccgaagtggtaccaaaacccagattacaatttcttcaataactacaagacgtatcggaagcttcaccctaaccaaccattttacatcttgaagccgcaaatgccctgggaactctgggatattttgcaggaaatcagcccggaagagattcaacctaatcctccgagttccggcatgctgggtattatcatcatgatgaccctttgcgaccaggtggacatctacgaattcctcccgtcgaagcgcaaaaccgatgtgtgctactactatcagaagttttttgacagcgcgtgtaccatgggtgcgtaccaccccttgctttacgagaagaatcttgtgaagcacctgaaccaagggacggacgaggacatctaccttcttggcaaggcgacacttcctggctttcggacgatccactgctaggcagaatttggatgatgcgattacttgagataatttcattttcatcagcaaaaacgaagtgcaacggtatctttggttcaccagaggccggcaaagctcttagggtggtgtaatgggctgttagcgctacggtacactgaagcgatcagctgcggtatctgtgtgagcgtcaagggtgcgctggtttctgcatctccgagatttaaatatcccaatggcgcgccgagcttggctcgagcatggtcatagctgtttcctgtgtgaaattgttatccgctcacaattccacacaacatacgagccggaagcataaagtgtaaagcctggggtgcctaatgagtgagctaactcacattaattgcgttgcgctcactgcccgctttccagtcgggaaacctgtcgtgccagctgcattaatgaatcggccaacgcgcggggagaggcggtttgcgtattgggcgctcttccgcttcctcgctcactgactcgctgcgctcggtcgttcggctgcggcgagcggtatcagctcactcaaaggcggtaatacggttatccacagaatcaggggataacgcaggaaagaacatgtgagcaaaaggccagcaaaaggccaggaaccgtaaaaaggccgcgttgctggcgtttttccataggctccgcccccctgacgagcatcacaaaaatcgacgctcaagtcagaggtggcgaaacccgacaggactataaagataccaggcgtttccccctggaagctccctcgtgcgctctcctgttccgaccctgccgcttaccggatacctgtccgcctttctcccttcgggaagcgtggcgctttctcatagctcacgctgtaggtatctcagttcggtgtaggtcgttcgctccaagctgggctgtgtgcacgaaccccccgttcagcccgaccgctgcgccttatccggtaactatcgtcttgagtccaacccggtaagacacgacttatcgccactggcagcagccactggtaacaggattagcagagcgaggtatgtaggcggtgctacagagttcttgaagtggtggcctaactacggctacactagaagaacagtatttggtatctgcgctctgctgaagccagttaccttcggaaaaagagttggtagctcttgatccggcaaacaaaccaccgctggtagcggtggtttttttgtttgcaagcagcagattacgcgcagaaaaaaaggatctcaagaagatcctttgatcttttctacggggtctgacgctcagtggaacgaaaactcacgttaagggattttggtcatgagattatcaaaaaggatcttcacctagatccttttaaattaaaaatgaagttttaaatcaatctaaagtatatatgagtaaacttggtctgacagttagaaaaactcatcgagcatcaaatgaaactgcaatttattcatatcaggattatcaataccatatttttgaaaaagccgtttctgtaatgaaggagaaaactcaccgaggcagttccataggatggcaagatcctggtatcggtctgcgattccgactcgtccaacatcaatacaacctattaatttcccctcgtcaaaaataaggttatcaagtgagaaatcaccatgagtgacgactgaatccggtgagaatggcaaaagtttatgcatttctttccagacttgttcaacaggccagccattacgctcgtcatcaaaatcactcgcatcaaccaaaccgttattcattcgtgattgcgcctgagcgagacgaaatacgcgatcgctgttaaaaggacaattacaaacaggaatcgaatgcaaccggcgcaggaacactgccagcgcatcaacaatattttcacctgaatcaggatattcttctaatacctggaatgctgttttcccagggatcgcagtggtgagtaaccatgcatcatcaggagtacggataaaatgcttgatggtcggaagaggcataaattccgtcagccagtttagtctgaccatctcatctgtaacatcattggcaacgctacctttgccatgtttcagaaacaactctggcgcatcgggcttcccatacaatcgatagattgtcgcacctgattgcccgacattatcgcgagcccatttatacccatataaatcagcatccatgttggaatttaatcgcggcctagagcaagacgtttcccgttgaatatggctcatactcttcctttttcaatattattgaagcatttatcagggttattgtctcatgagcggatacatatttgaatgtatttagaaaaataaacaaataggggttccgcgcacatttccccgaaaagtgccacctgacgtctaagaaaccattattatcatgacattaacctataaaaataggcgtatcacgaggccctttcgtctcgcgcgtttcggtgatgacggtgaaaacctctgacacatgcagctcccggagacggtcacagcttgtctgtaagcggatgccgggagcagacaagcccgtcagggcgcgtcagcgggtgttggcgggtgtcggggctggcttaactatgcggcatcagagcagattgtactgagagtgcaccatatgcggtgtgaaataccgcacagatgcgtaaggagaaaataccgcatcaggcgccattcgccattcaggctgcgcaactgttgggaagggcgatcggtgcgggcctcttcgctattacgccagctggcgaaagggggatgtgctgcaaggcgattaagttgggtaacgccagggttttcccagtcacgacgttgtaaaacgacggccagtgaattgacgcgtattgggatatttaaat

SEQ ID NO: 282 - DNA, 4550 bp, Artificial Sequence
  pLMTB9486
ttagcgctccgtagctcgctgcgtatgagaggtactgagctccaatgcatcacacggcgtacggcaacacacactatcttttcagtttatttttttaattatccctccaaaaagaagcaactgacacttcaaaatattcccaacaaggagcgtgaggtcagtgaccagtctcggacttcacaccgcgcatgtagaagcacgcggcttgcgcgccaggcttcttttggcaaaccacgctgcacagaatgtctgtgtacagcagccaggctgtgatcgatctattatgctcgcccctcgctcctccggcattctcgagtccatgtcgagcttgtctggctccgtgcacatgcaagcgtttgtgcgcgcctctaatgtaaccacacgtcaaaacattgtgtgtcttccgaagtgggagacaccggggccaccaactccggtggtttacagcctcctccctcaaccaacgctgccgattgtaccacctttcattgcgtctttgtgcccctccctatcttcatgtttccactgcgcttcgtttccgaatactattttcgtgtactgtttcatcactttctcacaacagctcttttttttcacccgcagaagatgatccacactaaccttaagcgaaagttcagttgcttcgtgttggtgttccttctctttgcaattatctgtgtgtggaagaagggctccgactacgaggcgctgacacttcaggccaaggtgttccagatgcctaagtcgcaggaaaaggtggccgtgggcccggccccgcaggcagtgttctcgaactcgaagcaggacccgaaggaaggcgtgcaaatactgtcgtatccgcgtgtgacggcgaaagtgaaaccacagcctagcctccaggtgtgggacaaggattcgacctacagcaagctcaacccacggcttctgaaaatatggcgcaactacctgaacatgaacaagtacaaagttagctacaagggtcccggacccggcgtaaagttctctgttgaggctttgcggtgccatctccgagaccatgtgaacgtgtcaatgatcgaagctacggacttcccttttaacactactgagtgggaggggtacctgcccaaggaaaacttccgcacgaaagccggcccctggcataagtgcgccgttgtcagctcggctggttccctcaagaatagccagcttggccgtgaaattgacaaccatgacgcagtgctccggttcaatggtgcacctacggataactttcaacaggacgtgggcaccaagacaacaatccgcctggtcaattcgcagctggttactacagagaagcgcttcctcaaggactctctttacaccgaagggattttgattttgtgggatccgagcgtgtaccacgcagacatcccccagtggtaccagaagcccgactataacttcttcgagacatacaagtcgtaccgtcgccttcacccatcccagccgttctacatcctgaaaccccaaatgccttgggaactgtgggacatcattcaggagatcagccccgaccttatccagccaaatccgccctcctcagggatgcttggcatcatcattatgatgacgctttgcgatcaggtagacatctacgagttcttgccttccaaacgcaaaaccgacgtgtgctattaccaccagaagttcttcgacagtgcgtgcacgatgggcgcataccacccccttcttttcgagaagaatatggtcaagcacctcaacgagggtacggatgaggacatttacctgtttgggaaggcaacactctccggatttcgtaacaaccgttgcgcaggagcatacccctacgacgtgccagattacgcctacccttacgatgtaccggactacgcttacccgtacgacgtgccggactacgcgtagatttaaatatcccaatggcgcgccgagcttggctcgagcatggtcatagctgtttcctgtgtgaaattgttatccgctcacaattccacacaacatacgagccggaagcataaagtgtaaagcctggggtgcctaatgagtgagctaactcacattaattgcgttgcgctcactgcccgctttccagtcgggaaacctgtcgtgccagctgcattaatgaatcggccaacgcgcggggagaggcggtttgcgtattgggcgctcttccgcttcctcgctcactgactcgctgcgctcggtcgttcggctgcggcgagcggtatcagctcactcaaaggcggtaatacggttatccacagaatcaggggataacgcaggaaagaacatgtgagcaaaaggccagcaaaaggccaggaaccgtaaaaaggccgcgttgctggcgtttttccataggctccgcccccctgacgagcatcacaaaaatcgacgctcaagtcagaggtggcgaaacccgacaggactataaagataccaggcgtttccccctggaagctccctcgtgcgctctcctgttccgaccctgccgcttaccggatacctgtccgcctttctcccttcgggaagcgtggcgctttctcatagctcacgctgtaggtatctcagttcggtgtaggtcgttcgctccaagctgggctgtgtgcacgaaccccccgttcagcccgaccgctgcgccttatccggtaactatcgtcttgagtccaacccggtaagacacgacttatcgccactggcagcagccactggtaacaggattagcagagcgaggtatgtaggcggtgctacagagttcttgaagtggtggcctaactacggctacactagaagaacagtatttggtatctgcgctctgctgaagccagttaccttcggaaaaagagttggtagctcttgatccggcaaacaaaccaccgctggtagcggtggtttttttgtttgcaagcagcagattacgcgcagaaaaaaaggatctcaagaagatcctttgatcttttctacggggtctgacgctcagtggaacgaaaactcacgttaagggattttggtcatgagattatcaaaaaggatcttcacctagatccttttaaattaaaaatgaagttttaaatcaatctaaagtatatatgagtaaacttggtctgacagttagaaaaactcatcgagcatcaaatgaaactgcaatttattcatatcaggattatcaataccatatttttgaaaaagccgtttctgtaatgaaggagaaaactcaccgaggcagttccataggatggcaagatcctggtatcggtctgcgattccgactcgtccaacatcaatacaacctattaatttcccctcgtcaaaaataaggttatcaagtgagaaatcaccatgagtgacgactgaatccggtgagaatggcaaaagtttatgcatttctttccagacttgttcaacaggccagccattacgctcgtcatcaaaatcactcgcatcaaccaaaccgttattcattcgtgattgcgcctgagcgagacgaaatacgcgatcgctgttaaaaggacaattacaaacaggaatcgaatgcaaccggcgcaggaacactgccagcgcatcaacaatattttcacctgaatcaggatattcttctaatacctggaatgctgttttcccagggatcgcagtggtgagtaaccatgcatcatcaggagtacggataaaatgcttgatggtcggaagaggcataaattccgtcagccagtttagtctgaccatctcatctgtaacatcattggcaacgctacctttgccatgtttcagaaacaactctggcgcatcgggcttcccatacaatcgatagattgtcgcacctgattgcccgacattatcgcgagcccatttatacccatataaatcagcatccatgttggaatttaatcgcggcctagagcaagacgtttcccgttgaatatggctcatactcttcctttttcaatattattgaagcatttatcagggttattgtctcatgagcggatacatatttgaatgtatttagaaaaataaacaaataggggttccgcgcacatttccccgaaaagtgccacctgacgtctaagaaaccattattatcatgacattaacctataaaaataggcgtatcacgaggccctttcgtctcgcgcgtttcggtgatgacggtgaaaacctctgacacatgcagctcccggagacggtcacagcttgtctgtaagcggatgccgggagcagacaagcccgtcagggcgcgtcagcgggtgttggcgggtgtcggggctggcttaactatgcggcatcagagcagattgtactgagagtgcaccatatgcggtgtgaaataccgcacagatgcgtaaggagaaaataccgcatcaggcgccattcgccattcaggctgcgcaactgttgggaagggcgatcggtgcgggcctcttcgctattacgccagctggcgaaagggggatgtgctgcaaggcgattaagttgggtaacgccagggttttcccagtcacgacgttgtaaaacgacggccagtgaattgacgcgtattgggatatttaaat
